United States Patent Application Publication US 2026/0258423 A1 - sequence listing, part 68

SEQ ID NO: 301568 - DNA, 83257441 bp, Homo sapiens (residues 61,909,404-64,044,210 of 83,257,441)
  source 1..83257441: mol_type = genomic DNA
cagcccttacttcttatttttatagatttagggggtacaagtgcagttttgttacatgaatctattgcatagaagtctgggctgttggtgtagtcatcaccctgatagtataccctgtacccaatataggtaacttctcaaccctcacccccttcccaccctcccaacatttggagtctatgatgtgtattatcccactcgcttatgtccatgtgtacacatgattagcacccactcataattgagaatatgcaatatttgactttgtttatgcgttatttcacttaatataatggcctccagttccatccatgttactgtcagacatgattttattcttttttatggttgagttgtattccatggtgtgtgtgtttgtgtgtgtgtatacatatatacgtgtgtgtgtacatgtgtgtatgtgtgtgtgtgtgtgtgtgtgtgtgtgtgtgtgtgtgcatatatcacattttctttaagcaaccatccgttgatagatgcttaggttgattccataacattgctactgtgaatagtgctgaaataaacatacaagtgtaggtacattttttatataatgatttctctacccagcagtaggattgctggacagaatggcagttctactctaagttcacaatggaatattattcagcctttaaaaaggaaatcctgacacatgttacaacatagatgaaccttgaaaacattatgctaagtgaaataagcaacatacaaaaggagaaatattgtataattccatttacttcaggtagccagaaagggtaaattcatacagacagaaagttgaatagaggttaccagaggatgggatgatagggggaatggggagttatttaatggatacagagtttctgtttgggatgatgaaaaagttctggaaatgggccaggcccagtggtggctcacgcctgtaatcccagtactctgggaggcccaggtgggtggatcacctgatgtcaagagttctagaccagcctgaccaacatggcgaaacccagcctctactcaaaataaaagtagccaagtgtggtggtgggcacctgtaatcccaactactcaggaggctgaggcaggagaatcctcgaacccaggaggtagagcttgcagtgagccgagattgcgccattgtactccagcctgggtgacagagtgagacgccgtctcaaaaaaaaaaaaaaaaaatagttctggaaacgaagagtgataatggttgcacactgtaaatatacttaatgccactgaattatatacttaaaaatgattaaatggcaaaattttatgttatgtatattttaccataataaaaacatatatacacatatgtattaaaatttaaaaatataataacttatttcagtgatctaatgcaccagttctcatgagtctggcccagaaccctggagatatatgctttcagggggtctggaaaggtgttaataatactcaagacattatctgtctttttctttctcattcactcacaagggtacggtgcagtttccaaaggcttctaccaagccagacattgaagatatttgaaaaaaatacaataaaataaaactatcattcttctcattaaattttgtttgggaaaacacagttagttttcatttaaaatatgttatgttcacatttaatagggttattgttgtttggttttggtttttttttaagagatgaggtctcgctatgttgcccaggctaaagtacagtcgctattcacaggcacaattatcacacactataccctagaaccccctggcttaagcaatcttcctgcttcagcctcctaagtagctaggactataggcacataccaacacaccagctgttcctatttttaaaagaactaaataaatatttcaaatatttaagtgttaatttctaatatggtaaatatcaacagaaaaaaagccacataaacaaaagctctttggtatccttagtgattttttaaaatataaggaggtccctgaaactagaaagtgtgagaaccacttgtctaatgacatcattcaaaaaatgtttctttctcttttagcagctgctaaagtattctgatccttagcctatacagatatttaaccctcacctgctgtccatttcggataaaagttccaaaccaagtccggactttcgcatttgttccaagaagcaaaccacttacaaaacaaaccaagtcactcactccatcctcacaagcttcatttttagtatgatccaatgtcaaagccacaccaaggcctggcaagtgacattcttccacctagcacagaaaagaaaacaaactgaattcagtatcataagcaaaaaggccagtgatgcttccaaatctaaagtatctaaagtttagaggaagaactcctacaaaacataaaaacccagagaggaaggtaacatatccagtatataaataaaattccccacctctacaggactctaaaaccatcttgagaagagttcttggacctaatataaaggcctttgtctaataaaacacaggatcacttaccaccatgcctcggaccttgagggcctgagaaggattcattttacacaagaagcgtaaggcatctgtcctgcgccttcctccaagactttcttcatcttgtcgttctccattttttatcaggcccctacaaactaacatgatagaaaccatcttcttcagccttcagaattaattgttcatgaagatttcacatgacagaagaaaaggatcagggtatttgaaagcacaacaacagaaattggccaaaatgaagcaaaaaatgaaaagagacttaaaaaagaatagtaaactctgggacaatattacacattcaaacacacttgcaattacggtcccagagagacaaagaaagtacgagacaaaaatacatttgagggccacggacagtggctcacacctgtaatcccagaactctgggaggccaaggtgggggcggggggggggggggtgcggggcatggatcacctgaggtcaggagttcgagactagcctggccaacatggtgaaaccccatctctactaaaaatacaaaaattagctgggcgtggtggcaggcacctgtaatccgagctactcaggacgctgaggcaggagaatcgcttgaactgggaggtggaggttgcagtgagccaagatcgcatcattacactccagcctggggcgacaaaagcgaaactccttctcaaataaattaattaattaattaatttgaagaaattttcccaagttgaatgaaaactctaaacccagttcaatgagccctaagtggaacaaatgcaaagaaaatcataccaagaaacatcatacgtcaactttctgaaaccagtaataaaaagaaaatcttaaaagtaaccagggccgggtgcagtggctcacacctgcaatcccagcactttgggaggccgaggtgagtggatcactaggttaagagctcgagaccagcctggccaatatggtgaaaccctgtctctactaaaaatacaaaaattagctgggtgtggtaatgcgcacctatagtcccagctgctcaggaggctgaggcagcagaatcacttgaacccgggaggtggaagttgcagtgagccgagatcacaccactgcacttcagcctgggtgacacagcaagactccatctccaaaaaagagaaaaagtaactagagcagaggataggcgcatcacctgaggccaggagttcaagatcagcctagccaacatagtgaaaccccatctctattaaaaatacaaaaattagccaggcatgggggcacatgactatagtcccagctacccgggaggctgaggcaggagaactgctttaaccccaggggaggcggaggttgccgtgagccgagctcatgccactgcactccagcctgggtgacagagcaagactccgtctcccaaaaaaaaaacaaaaaaaaaggagccagaagaaattaaagaaaaaaaaaaaaagtagccagagggaaaaagaaactttacagaggaacaaagataaaatttactgcagaaaagagaatgacatctttgttctttgttttcttttttcctagagatgggatcttgctttcttgctttgccaccatactagtctcaaactcctggcttcaaacaatcctcccgttttggcctcccaaagtgctgggattacaggtgtgagccacatacccagccagaatgacatctttaaatagctaaaagatgacgtcaacctaaaattttataccctttgaaaatatatttttccagaccaaaaaagccagtaaaatttgttgccaacaaacccaccctacaaaaaataaggaaaattcttcaagttaaggggaaattatgccagatggaaatatggaactacagaaaggaattaagagcaccaaaaatggtaaatgtgtggataaatagtattttcctctatatttttagtctttaaaatataattaactgtttaaaacaaaagtaataacaatttgctctaaggtttataattcatgtaaaagtaaaatccatgacaacaatggcacaaagtacaagaggaaaaagaaaataaatagaaaacaaataacaagaagattcaaacctaaccactataataatcacatttaaatggtctatgtatacagtctaaacactccaattaaaagacagagactgccactagattaaaaaaaatgaagaccgaactatacctgtccacaagaaatcgaccttaagatatggacagattaaagagatgaagaaatatatacaccatggaaaaactaattataagaaagatgacatggctgtattattcagacaaagtagacttgaaaagaaggaatattatcagcaataaagaagtctattttgtcacgcctgtaaatcccagcactttgggagattgaggcaagcggaccactttagcccaggagtctgagacagcacgggtaacatggtgaaaccccatatccacaaaaatacaaaaaattagctgggcgcgccaggtgcagtggctcacgcctataatcccagcactttgggaggccacagagggcgcatcacgaggtcaggagatccagaccatcctggctaacacggtgaaaccgtgttactactaaaaatacaaaaaaattagccgggcgtggtggtggcgggcgcctgtagtcccagctactcgggaggctgaggcgggagaatggcgtgaacacaggaggcggagcttgcagtgagccgagattgcgccactgcattccagcctgggcgacagagtgagactccgtctcaaaaaaaaaaaaaaaaaaaaaattatctgggcccagtggtatcggctggtagcctcactcactcaagaggctgaggcagaaggatcactcgagcctgggagatcaatgctgcagtgaatcatgaccacaccactgcactccagcatgcgtgacagagcgagacactatctcaaaaaaaaaaaaaaagcgtattttggaggttaaaaatctctacaaagaggccaaggacagtggctcatgtctgtaatcccagcactttggaaggccgaggaggacagatcacttgaggtcaggagttcaagaccagcctggccaacatggtgaaactccgtctctactaaaaatacaaaaattagccgggcgcggtggctcacgcctataatcccagcactttgggaggccaaggcaggcgattcacaaggtcaggagatcaagaccatcctggttaacacagtgaaaccccgtctctactaaaaacacaaaaaattagccgggcatggtggcaggcgcctgtagtcccagctactcgggaggctgagacaggagaatcgcttgaactggggaggcagaggttgcagtgagccgagatcactccactgcactccagcctgggtgacagagcaagactccgtctcaaaaaaataaataaataaataaataaataaataaataaataagccaggtgtggtggcccatgcctgtaatcccatgaacttgggaggctgatgcaggagaatcgcttaaacccaggaggtagaggttgcagtgcgccgagattgcgccactgcactccagcctgtgaaacagagtgaaactctgtttcaaaaaaaaaaagtccgggcgcggtggctcacgcctgcaatcccagcactttgggaggccgagaagggtggataactaggtcaggagatcaagaccatcctggctaacacggtgaaaccctgtctctaattaaaaaaaaaaaaaaaaatacaaaaaattagccgggcgtggtggcgggtgcctgtagtcccagctactcgggaggctgaggcaggagaatggctgaacccaggaggcagagcttgcagtgagccgagattgtgccactgggcgacagagcaagactctgtctaaaaaaaaaaaaaaaaaaaaaaaatcatataagacacaaacaaatggaaaaacattccaagctcatggattggaagaatcattatctttaaaatggccatattgcccaaagcaatctacagattcaacactcttcatatcaaactaccaacatgattttccacaaaattagaaactttaggatactaaagttcacacagcaaaaaagagcctgaatagccaaagcaatcctaacaaaaagaacaaagccagaagcatcacattatctaacttcaaactatactacatggctacagtaaccaaaataacatggcactggtataaaaacagacacacaggccaggcacggtggctcacacctgtaatcccagcactttggtaggctgaggcgggcagaccacgaggtcaggagatcgagaccatcctggctaacacagtgaaaccccatctctactaaaaatacaaaaaattagccaggcatggtagtgggtgcctgtagtcccagctactcaggaggctgaggcaggagaatggcgtgaacccagcaggcagagctgcagtgagccaaggtcgcacccctggactccagtctgggtaacagagtaacaaaaaattaataaataaaaataaacagacacacggaccaatgcaacagaatagaaaacccagaaataaagccacacacctacaatcatctgatcttcaacaaagttgacaaaaataaatgacagggaaaggactccctatttaacaaatggtgttgggatagctggctagccatatgcagaagaatgaaactagaccctatcttttatcatatacaaaaattaactcaagttagattaaagatttagatgtaaaacctcaaactataaaaatcctagaagaaacactaggaaatactattctggacactggccttggcaaagaatttatagccaagtcctcaaaagcaattgcaatgaaaacaaaaattgacaagtgtgacctatttaaattaaagatattctgcacacaaaagaaactatcaacagagcaaacaatctacagaatgggagaaaatattgacaaaaatgtatctgacaaaggcctaatgtgcagaatctataaggacataaacaattcaacaagcaaaaaaccaccccattaaaagtgaggaaagaacacgaacagatacttctcaaaagaagacatataagcaaccaaaaaacatgaaaaaaaatgctccatatcactaatcatcagagaaacacaaatcaaaacaatcatgaaatgccatctcacaccagtgagaatggctattaaaaagtcaaaaaataataggtgctagcgaggctgtggagaaaagagaacacttacacattgttggtgggaatgtaaattagttcagccactgtggaaagcagtttggagatttctcaaagaacttaaaacagaactaccattcgacccagcagtctcactgctggatatatactcaaaggacaacaaattgttctaccaaagacacatgcgcttgtatgttcatcccaatactattcacaatagcaaagacatggaatcaaccttggtgcccatcaacagtggattaaataaaatgtacatatataccatgaaatactatgcagccattaaaaagaatgaaatcatgtcctttgccgcaacaaggataaagctggaagccatcccatcctaggcaaattaacacagaaacagaaaaccaaataccacatgttctcactataagtgggagttaaacattgggtacacatggacataaagatgggaacaatggacactgggactaccagtggggaggaagaaaggggacaagggctgagaaactacctattgggtactatgctcataacctgggtgacgggatcattcaaactccaaacctcagtgtcatacaatatacccatgtaacaaacctgcacatgtacccccctgaatctaaaataaaacttcgaatttttttaaaaagaaaaattaaaacaaaggtgacaacaaattgaataatatgtaaataatgtttagaaagggggatataactataaatgtgaaaactaagaataaagaaatcaaatttgacttggggaaaaaagtatattttataatgaaaaaaaggctcaattcatcataaagatataatcatcctaaatgcatataaacccaacaaaagagctttgaaatacatgaagcaaaaactgacagaacaaaaagaagaaataggcaaatccacaattatgtctggagacatcaaaactcctctctcagtaattgacagaacaagttgacaaaaaatcggcaaggacacagtttacaaagagtttttacatatcatctgatattcaataaatctcttaaaaaagtcagggaactattacactatcaatatctccattttacagatgagaagtattttggtttgtttgtttgtttaagacagagtctcactctgttgcccaggctggagtgcagtggcacatatcggctcgctgcaacctccacctcacagattgaagcaattctcctgtctcagcctcctgagtagctgagattacaggcatccaccaccaagcccagctaatttttgtatttttagtagagacggggtttcactatgttggccaggctggtctcaaactcctggcctgaaatgatgcacccacctcggcctccccaagtgctgggattacaggcatgagccaccgtgcccagccagatgagaagtattttgatagagctcacacaataagtgaatgacaaaatcaggaattataactccagtactttttcctcccaggctcctaattcacaaactaccttgctcaacaaaatgtttttatttttatatcactcatacccaaacaacaaccttcaatcactgtaagttttaaatagaggtgaaaaaatgtagtcgatttttctcaatttctactttatacttctctgtaaactgacagcagtagggctaaaaaacaaaggtctgattcctagcatttctcattatacatatcccgtattgctctcttgatatttcactgatacatgtatcttctttgatccctgattatagatattacatcttctagttccttggggtttttttttttttttttttgagacggagtctcgccctgtcgcccaggccggagtgcagtggtgcgatctcgactcactgcaacctccacctcccaggttcaagcgattcttctgcctcagcctccccagtagctgggactacaggcacccaccaccacatccagctaatttttgtatttttagtagagatggggtttcaccatagtggccaggctggtctcaaacttctgaccttgtgatctgcccgcctcggcctcccaaagtgctgggattacaggtgtgagccactgcgcccagcctgatctttaaactcaatacaatttgtgaactcaatatttctttatacatactaacaaactttcaaaagataaaatctcaaataaaatcccattaatgtttcttcttaggtcaaaaagataggtcctgtacatgtccaagcaagtcttttcaatataccatattagaatcatatttaccttcattaaaactatcaggaacattggccaccaagagacacaagaaccaggcaccatttctaacatgtagcaaagcttcagctacatcaactatagggagcaaggaagggagctctacaagaaaacaaagtcagtgttagtctttgttaacaggtgcactccaccacacccagctaattttttttattttctgtggagactgaatctcactgtgttgcccaggtgggtctcaaactttggcctcaagtgatcctccagcctcagcctcccaaagtgctaagattacaggcataagccaccatgcctggacccagtgttaaagagtgatatttctttttttcttctttaagacagggtcttgctttgttgcccaggctacagtgcagtggtgtgattatagctcactgcagcctcaacctcctgggctcaagcaatcctcctgcctcagcctcctaaactcctagaattacaggcatgagccaccatgcccaaccaaaaatgacatttcattgtattattaaatatcttttgacatttcacaaatgtcatctaaaataaagtactttcttttcatagtctagaaccaagctgtccagtaggatacccactagcaacataaggatacttatattaaaaacagttcagttcctcaatcacactagccacatttcaagtaatccacagccacaaagaacactggacagcatagcatagaacagtacaggaaattttattttatagaactggtctaaagagttattttcacgaaaatcttatttgcttttttttttttttttttgcgacgaagtctcgcttttgtcccccaggctggaatgcaatggcgcaatctcagctcaccgcaacctccgcctccagagttcaagcgattctcctgcctcagccgcccgaatacctgggattacagaagcctgccaccacaccaggctaatttttgtatttttagtagagacagggtttcaccatgttgacctggctggtctccaactcctgacctcaggtgatccacccacctcggcctcccaaaatgctgggattacaggcgtgagccaccgtgcctggcctatactttttttttttttttttttttttaagaaaaggtctgcagccaggcacagtggcttatgcctataatcccagcattttgggaagctgaggcaggcagatcacaaggttaagaattcgagaccagcctggccaacatggtgaaacctcgtcgccactaaaaatacaaaattagctgggcatggtgccgcatgcctgtaatcccagctactcaggaggctaaggaaggagaatcacttgaaccccggaggcggaggttgcagtgagccgagatcacaccactgcactccagcctgggtgacagagtgagactccatctcaaaaaaaaaagacaaggtctcactctggacagagtgcaatggcacaatcatggctcactacagcctcaatctcccaggctcaagccatcctcctgcctcagcttcccatgcagctgggactacaggtatacaccaccacactaggctaatttttttcattttggtagagacaaggtctcactatgttgcccagactggtcttgaactcttgagctcaagtgatcctcctgcctcggcctcccaaagtgctgggattacaggcatgagcgacagccttctttacatttttctgtcctcttttatttctatcattcacacctattatatacaatctggaaaatacaaaaaggtacgaagaagaaaattaaaatctgccctaatcccagaattcaaagttaataaaaaatgttttcacaggcctgtagtcccagctactcagaaggctgaagtgggaggatcccttgagtccaggaattcaagccagtgggctatgatcctgccactgtactccagcctgagcaacagagcaagactctgtctctaaaaaaaaataagtattttattttaattcatcaagggtattgttcttgaacttttaacaaaactgggattatagtctacttaacactttgccctttgcttttttcacttaacatattgtaaacattttccaaaatcattaacgagcattaaagtcattaaatcaaagataccatgttaatgtctgcataatatgtcacactatgaaaataatataatttacttaatcattgtccaactattagtcacttttgacttaaaatcacataacatgtttgttatatgatccctaaaataacacagcataccaggctaagaagttacacagtatcatttaacaagaaactatatatgaaatccatcttagcactcagtacagtacctgcttgtaaaatacaaagtacatctgcagcttcctccaaatatactggactctcaaaaagttcagaagacttgaaaaaaaattctccgttggactcagacaccttaaaaaagaaaaaaaaaagatataaactctattaatttcagataattaaatccctatttttataattatttcttgagctcacagattatgtctcttaatgtatcactaatataccacagcagaatatgcagtattcaatcaatttcaaccaatttaaccacacacagcagtcatgttaattattattcagatatagcagtatcaatctcaagaactgatttctatctaaatatttggagacaactggaattaaaggataaggcaagccaaagaaatgaactacaaatgcagcctacataaactgctttaaaaaagccaagaacagtcaacctaaagcagtttaacaaatataaattcatggccaggtgcagtggctgacgcctgtaatcccagcactttggaaggccaagatgggtggatcaactgaggtcaggagttcgagaccagcctggccaacatggtgaaaccctgtctctactaaaaatataaaaattagccaagcatggtggccatctgtaatcttagctactcaggaggctgaggcaggagaatcgcttgaacccgggaggtggaggctgcagtgagccgagatagcaccactgcactccacactgggagacagaatgagactccgtctcaaaaaaaaaaaaaaaaagaaaaagaaaaaagaaaacaaacaaacatatatatatatatatatatatatatatatatatacgtgttcaattctgaataaactgttggaaaaacaaagaattaaagtttagataacaaaatctactaagctttttggaaattctgcacaatagtttcataaccatatttcctatataatgaagagtgccaaactaaaaaattggaaatctcccagaggagaaaggtcacttatttattagagtcaccaagtgaggtattacggaaaagatgaaggaaaactcttggctgaaatttaaaagtatcaaaataggctgggcatggtggctcatgcctgtaatctcagaactttgggaggccgaggtgggaggatcacctgaggtcaggagttcgagaccagcctggctaacatggtgaaaccccgtctctactaaaaatacaaaaattagcaggcatggtggcgggtgcctgtaattctagctactcaggaggctgaggcaggagaatcgctttaacccaggaggcaaaggttgcagtgagcaagatcacaccattgcactccaacctgggcaacaagagcgaaactctgtctcaaaaaaacaaacaaaaataaataaaagtatcaaaatagtaaaaaagagaaggaaattataattggtgatggaaattttagaaaaattttttaacataccttaaaaactgtctaaaactcggccgggcgcagtggctcgtgcctgtaatcccagcactttgggaggccaaggagggcggatcacgagatcaggagatcgagaccatcctggctaacacggtgaaaccccgtctctactaaaaatacaaaagattagccaggcatggtggcgggcacctgtagtcccagctactcgggaggctgagacaggagaatggtgtgaacccgggaggcggagcttgcagtgagccgagattgtgccactgcactccagcctgggcgacagagtgagactctgtctccaaaaaaaaaaaaaaaaaaaaaaaaactatctaaaactcaccaaaatcctctctaccagtattttctatgaaaacagaatttagtcctttctctttttgtccacaatttataaaactaaactttatttactataaattaactgactccccaaaattataacagtaaataaacataaagatctaatttagtgggtttttgtggtggtggtggttgttgtttttgaggcagttttactcttgttgcctaggctggagtgcaatggcacaatctcggctcaccacaacctccacctcccaggttcaagcaattcttttacaggcatgcaccaccactcctggctaattttgtattttttagtagaaacggggtttctccatgttggtcaggctggtcttgaactcccaacctcaggtgatccgcccacctcggcctcccaaagtgctgggattacaggcgtgcaccaccacgcccagctaatttagttatttatatgatagaactttgacattcaaaaattttaaattcagagtttcaattaactatattacccaaaggtctatgacctaagtaatctataattttacaaagaagataacttgaatagctttcattagtgtaaagaagcactttggtcatttagtgattgagactagccaatcatcctacattcaattcagcattgatactcccctctgctgtcatatatgaggctgttactgctcatccagtgtctaaatgaatcacatacatttttcagttattcacattcagttattgaaaatgttacttcattacactttatgggagaaattgtatcccataaaggtattatctgctaataaatttgataatctgtacaagccttgagataaatccctttctaaatgtcaagaagccactgtgtatggattccatacggaaaaaaatccctctcatagaaaatgcagaacaagtataaatgagagaaaatgataattaagagaaggactttaaggcagacttataatatcctttcaggctttgaaaggaaaacaaatatatagaaataaaagtagagaaggccgggcacggtgacccatgcctgtaatcccaacactttgggaggctgaggcgggtggatcacctgagttcaggagttcgagaccagcctggccagcctggtcaacatggtgaaaccccatttctactaaaaatacaaaaaattagctgggcgtggtggcgggcacctgtaatcccagctactcatgaagctgaggcaggagaaccgtttgaatctgggagacagagattacagtgagctgagatcacaccactgcattccagcttgggcaataagaatgaaactccgtctccaaaaaaaaagaacaaaataagagtagaggagaattcaacctgcctgacttcttgtctctttttctgtctacctccctatacatagacatcaaatcatgcatactttgagctgtggttaaaagaaatgcaccttgttcataattgccaacagttcactaagcacaagacgcaatcgacgaggtgaatcactgtgttcaaactctaacgtcagtccatgctgaagctgtgataccaggatgctctctccactgcctcctccaagtttatgcctaatgaagtacaaaacatgtaacaattatgaaaacactgatatggaaataattgcataaaaattatcttttattgaaataagctataaaaggatgtataaagtgttctaaaatgttctgttacttctgaaatgctatttagtttgcctgtgtatttcagggattcacatcctacgtataataaatactccaccacataggccaggcacagtggctcacgccggtaatcccagtactttgggaggctgaggcaggtggatcacaaggttgggagttcgagaccagcctggccaatatggtgaaacctcgtctctactaataatacaaaaaagccgggcatggtggcgcgtgcctgtagtcccatctactcgggagactgaggcagaagaatcacttgaacccaggaggtggaggttgcagtgagccgagatcacgccaccgcactccagcctgggcaacagggcaagactcggtctaaaaaaaaataaaaataaaaataaataaataaatactctaccacaactgacaattaacactcacttccactgatggtggcttgctactagattcacaatgggcagggaaggacatagcacctgcccagaatctttgggaatatctaagctttaaaagcctcccaagaggctgggcccagtggctcacacttgtaatcccagcactttgggaggccaaggcaggtggatcacctgaggccaggagttggagaccagcctggccaacatgatgaaaccccatctctactaaaaatacaaaaaattagccgggcatggtggcaggtgcctgtaatcccagctactcgggaggctgaggcaggaggatcgcttgaacctgggaggctgaggttgcagtgagccaagatcacgccattgcactccagcctgggcaacaagagcgaaactctgtctcaaaaaagaaaaaaaaaagcctcccaagtgattccaataaatccctctaatctaggggaagttaccctacctacttcccactgaaagtaattggcctaatgagtttagcccacatacaacagcacattgccatatttctctagataacattttataacatggaagtcaaaagattctggaactgtaactatatacagaaaagacctaagtaaaatgctctccagaatttagattctcattctctcttttctggagagctctaaaaaatatctgattccctgttctttgtcaaatccaaatccacatataatataacataacattacctaagctgctgttctttgctggcatcttgttctaaagcatgaaagtccacggacaacaatgcaacaatggagttgacagcttccactccagaaagaaggcgaaggatgagtttcttatcctgagcccagctttggctctggtcagcaggtgcacaaagtgccatccgtaccaaacagggcagaagaagtcttaattctggatcacttaaagatgccaggcaaacaacatccaccttctgcattgcctcaaaagcaaaagggctgacaaactgaagacttgtacattcagtcattattactgtttgttgatcctaatggtaaaaatacaaatgaaagtaggagtttaactttcacatgtatgaacacccaactttctaaaaaccctgaaaaatgtggtgtatctttaataggtccctatgttggcaatgttcctggcacaatcaagacaaggcttctctgtctccctaggtttatactgtcacctgggaaatgggaaagaaaacagagtatattaatgtctcttccagcctcaggaatcttctgctctaatactcatattttacaaagaaggaatatgaagcccagagagatgaagtaacacgcccaaaatagtattactagttagaggcacaatccaaggctgaatcctcatctactaaaatcccagtccaagactttctccactatatcagtcacatgagctccacaaaatgtaaacaaaagtgaatggtcatagttaagtgctttctttcataccccgatagtttcacatgcctaccccgatatacatcaagaactattgggcttctctttctcaccctccatgagtcggtggaaaaactagcaaatcactgggcagaaccaatgccagattcaaggctctggaggccacaacactatcctatgtcccctgtgttaccgggtaaaaagcagatgtgtgggtgctatgtgagaaagacgcgtctcattagcgcacttctctgtctccaggaatcatccaaggcacaaaaagtaaacaaaaaggcagtgagctggcagccaaagcagtcccctctcaaggccgaccgactagcagcagcgtgggtaaaagtcgtgggtaaaaactgctttgctttcagggaggggctgctcttttaacagaggggcgggctgactggagcagaggagccaagacctgcgtgctcctccgtctcgccccgggcgcaactagaaccaataagtccctcaggctgagcaaagtctggccaggctccgacacggacctaggaacgcgctgaggccagagaagcggacgcttcataccttaagatctaccctccagcctcacggaaccgcacacggactccgcgtcctagaggcgggacgcggcagaaatcgagagcgcggtccgatgttgggcctaggcgatatccggaaccccaaaccctagttgtgcctcgagtcgactcggacaccaagaactcagacgccgggaccaaccgggttgtcgatacaaagtgggaaggatgggggcaccacacaaaggcagaaccgggactgtaggaacggaaaagcgggagactttttcaacctgcacccagcaccttcattcatccccagcgtctgactcccgtcggccaccgtactggtctgagaggaagggtggctgcgagaggaaaggcagagacgtcggcgccaatgcaactgtgcgcgtgcgcggccccgcccctttctccactttatttgccctgccctacttgttcgccaaaaatttagaaatgtgattctggtaggctctgatttccagagcctaccagctccttccttttagacaagcaagccactgagcccctcagaacttaaatttcatcatcacaggattgccatggcattcaaatggcataacgtgtgttaaaatcgttcccactattctttgacactagtggtaccaaactgtactctttaaatctttgcctgtgccttcccagaaccaaaattctagaatcccaggatttgtgggagaattttaaaagtgatctaaccccaaactttcttccgctcttgacctcacacctccgctgtcagaagttaaacaccttcctttcaggttcttaacttgggggacccatagaaccttagagaggcaatgcacggggattcaggaattctctggaatccgttcagaactgagtgctcggcacttcttctgggaagagggtccaaaactttcaacaacttctcaaaggaagtctgatcactcagaaaagaaccactagtctatatatgaagaaccgctagtccatatgtcttcatactatttattgttcctagttcgatcaacgtttatttggcaacttctatttaccagatattgtgctaggagctggaaataaaaatattttacaaagatatagcactttataacctctttaaaaataaagtcagagccgggcgtggtgtctcatgcctgtaatcccagcgctttgggaagccgaggcgggcggatcacctgaggtcaggagttcgagaccagcctgacgcaacatgactaaaccccaactctacaaaaaatataaaaattaggccgagcacgatggctcatgcctgtaatcctagcactttgggaggccgaggcaggcagatcacgaggccaggagttcgagaccagcctgaccaacatggtgaaactccgcctctactaaaaatgcaaaaattagccaggcgtggtggtgtgcgcctgtaatctcagctacttgggaggctgaggcgggagcattgcttgaacctgggaggcggaggttgtggtgagctgagatcgtgccattgcactccagcctaggcaataagagcgaaactccgtctcaaaaaaaaaaaaaaaaaaaaaaaattaccccagcgtggtgatggagcacctgtagtcccagctacttcggaggctgagacaggaaaatcacttgaacctaggaggcagatgtttcagtgagcagagatcatgccaccgcactccagcctgggcaacagagccagactccatctcaaaaatatatatatatatatgactttcaacatagatcagcaaaggaagaaaagaattgtgtgttgcaatgcttctgaaaattttttccacctgacccacaataatacatttcacattgtgacccagaaaaaacatatgtatatatccacatacaaaaataagtgtaagtgtataaatttatatgctatataaacatataaatatataacatataaacccacatttacatggaaacaaatatttcgtataataacacacacactacatgtttctacttctctttaaaaaactgctggtcactgcacactaaaactgatttcacactctattaatgggttgcacactgtactgtcctagcatttttaagctaatatttgggatttatttattgaacacttgctaggcactgtaataaatgctttatatatattatctgattcaatcttgtgacgtaggtaatattcgccttttgcaattgtggaaactgagagagggtaagcaatttcatctccatggatggtcatttcacaggaaaagtgtgaaggcagtgcaaacattggtttgagggacgaatgagaggaagatgtgggtatgaactaagtgattttaaagatcctttccaactctaattatgatcctctgttcactaatggagaaacatcatgcagattcagtatctccatcttgatctatggagaaacagaaaaatcactgaatgagatggctgcagtgtcacataatgagtgctgacacttcctccaagtccccctctccttttcttccagttcaccaacttgaccttgagttgctcaagccagaaacctaaaagtcatcctagactctaatctctcccccttgtattaatttagcaaaaatctttataatcattgaaacattgtaatgtttgccaataaaacttttttttttttgagacagagtctcgttctgttgcccaagctggagtgcagtggcacgatctcggctcactacaacctctgcctcccaagctgaagcaatcctcccacctcagcctcctgagtagctgggacaataggtgtgcaccaccacacttggctaatttttttttttttttttttgagacagagtctcgctgtgtcacccaggctggagtgcagtggtgcgatcttggctcactgcaacctccgcctcccagggtcaagcgattctcctgcctcagcctcctgagtaggtgggattacaggtgcctgccaccatgcctggctaattttttgtatttttagtagagacagggtttcaccatgttggccaggctggtctcaaactcctgacctcagctgatccacccaccttggcctcccaaaatgctgggatttcaggcatgagtccctgtacccagcctctctttttttttccttttcgacacaagttctcaagaaaagagcggcagtgcagttgggcgatcttggctcactacaacctcaacctcctgggctcaggtgatcctcccacttcagcctcccaagtaactgagactatggtcatgcatcaccacacctggctaatttttctatttttttgtagagacagggtttcattatgtggccaggctggtcttgaactcctggactcaagccatctgtcccccctcagtccaccaaagtgctaggattacaggtgcaagccactgcacctggcttgaccagcttgcttttattcttctactttatttttcaatcagactggaggaagagagaaacacaagtaatgaaaaaatgagaaaaacagaaaaacacattagaatatctattatgtttcatgtatactaggtgcttaatgtaggttgcagagtaattgagcttccagcagttagaagacctaactatacaaaggtgaggaccaatgtccttcagaaatagtcatagaattccagaagcacaaggatctcagaagacatctagctccattttgctcaacatgatgctctttatagtgtgactattttatcttgtaagatgtctttcaggagggcacgatggctcatgcctgtaatcccagcactttgggaggccgaggcgggtggatcacgaggtcaggagttctagaccagcctggccaatatgatgaaaccctgtctctactaaaaatacaaaaattagttgggtgtggtggtgtgcacctgtagtcccagctgcttgggaggctgaggcaggagaatcgcttgaacccgagaggtggaggttgcattgagccgagattgcgccactgcactctagcctgggcaacagagtgagactccatctcaaaaaatatatatattctttcatgtttcagcctgtaaagatctttgactcttttacactggctatctgttttagcttagcagatcatatcttcattaatattatggataaaacattgaatagaattgggtccagccaagacttctagttcagcattagagacatccctccaggttgacatagctccaccaatcaaggctcaagtatgagactgttttataaatcagcccaactactaaaacactaccctgctttgggataaagttgaatttctttaggatggaactaaaaagacagattgattgattatatttttttgagacagagtctcgctctgtcaccctggatggagtgcagtggctcaatcttggctcactgcaacctccgcctcccaggttcaagcaattctcctgcctcaacctcccaagtagctgggattacaggcacctgccaccatgcccaactaaatttttgtgtatttttaggagagacggggtttcaccatgttggccgggcttgtgtcagtctcctgacctcaagtgatctgcacggcttggcctcccaaagtgctgagattacaggcgtgagccactgtgccaagccctaagacagattttttttttttgaggtggagtctcagtctgtcgcccaggttggagtgcagtggcacaatctcagctcattgcaacctctgcctcttgggttcaagcgattctcctgcctcagcctcctgcgtaactgggattacaggcacccaccaccatgcctggctaaattttttggggtattttcagtagagatgggttttcaccatgttgaccaggctggtctcaaactcttgacctcaggtgatttgcccacctcagcctcccaaagtgctgagattacaggcttgagccactgcgcccaacccaaaaacagatttttatggtctgacttaaaactctagcttggagtcctgccgtatcccaccatggtgtcattttagtcagttggaactgtttatgtctcaaatccttctcaatattcttggaccttctcatcacagttcctcctgtctagaatgcttttcattctcttttttaatgcaaactcctaagtgtcctttaagtctcacctccagtgttcccttgctaagagacctttccctgacaaaccacctaccctttaacttatcaggtatccctattctatgctctcaaggcaccttttgcttctttcagctatactacttaacacattatattgtaattgttagaacttctctgtctctcccactaaaaagtattttgagagggccgggcacggtggttcacccctgtaatcccagcactttgggaggccgagatgggtggatcatgaggtcaggagatcaagaccatcctggctaacacagtgaaaccctgtctctactaaaaatacaaaaaattagccgggtgtggtggcgggcgcctgtagtcccagctactcgggaggctgaggcaggagaatggcatgaacccaggaggcggagcttgcagtgagctgagatcgtgtcactgcattccagcctgggggacagagtgagactccgtctcaaaagaaaaaaaaaaaaggaagtattttgagagcagggaccatattttagttccttgccaaaggcacagtacgacacttaacttactttgttgaattaatgattcaagcataaagataccacgatgcatagtttgcaaatattctcccattctgcaggttgtctgtttactctgttgatagtttcttttgctgtgcagaagctcttaagtttaattagatcccatttgtcaatttttgcttttgttacaattggtttttgtgtctttgttataaaatcttttcctgttcctatgtccagaatggtattgcctaggttgtgttccaggatttttacaatttgggggtttacatttaagtctttaatccaacttgagttgattttttatatggtgtaaggaatgggtccagcttcaatcttctgcataggactagccaattatcccagcaccatttattgaatagggagtcttttccccattgcttatttttgtcagctttgttaaagatcagatggtcgtagatgtgtggccttttttctgggctctctattctgttccattggtctatgtggctgtctttgtaccagtaccatgctattttggttactgtagccccgtagcatagtttgaagttgggtaacatgaggcctccagctttgttctttttgcttaggattacctcagctatacgggctcttttttggttccatacaaattttacaatagctttttctagttctgtgaagaatgtcattggtagtttgataggaatagcactgaatctgtaaattgctttggaaagtatggctattttaatgatattgattcttcccatccatcagcatgggatgtttttccatttgtgtcttctgtgacttctgacaaatgtgtaacatccggcatctataagaaactttaaaaaaatgtagaagagaaagacagccctggccaggcacagtggctcatggctgtaatcccagcactttgggaggccaaggcgggcggatcacctgaggtcgagagttcaagaccagcctgaccaacatggagaaatcctgtctctactaaaaatacaaaattagtcgggtatagtggcgcatgcctgtaattccagctactcaggaggctgaggcaggaaaatcgcttgaacccgggagggagaggttgtggtgagccgagattgtgccattgaactccagcctgggcaacaagagcgaaactccatcaaaaaaaaaaaaaaaaagacagccccattaaaaagtgggcaaagaggccgggcactgtggctcacgcctgtaatcccagcactttgggaggtcgaggcaggtggatcacaaggtcagcagtttgacacaagcctggccaacatggtgaagccccgtctctactaaaaatccaaaaaaaaaaaaaaaaaaaaaaatagcatggtggcgtgcacctgtaatcccagctactcgggaggttgaggcaggagaattgcttgaacccgggaggcggaggtttcagtgagccaagatcacgccactgcactccaccctgggtgacagagcgagacgccgtctcaaaaaaaaaaaaaaaaaagtgggcaaagaacataaacatccacttttcaaaagaagacatacaggcggccaacaagtgtatgaaaaacaggtaaatatctctgagtattagaaaaatgcaaatcaaaaccacaatgagatatctcacaccagtcagaatgagtatttttaaaaagtcaaaaaaatagtgctcgctttggcagcacatatactacaatcagaaacatacaaagaagactatcaaatttttttttttttgagatggagtctcgctctgtcgcccaggatggagtgcagtggcacgatctcgactcactggcaagctccacctccggcattcacgccattctcctgcttcagcctctcaagtagctgggactacaggcgcctgccaccacgaccggctaattttttgtatttttagtagagacggggttttaccatgttggccaggatggactcgatctcctgacctcgtgatccgcccgcctcggcctcccaaagtgctgggagtccaggcgtgagccaccgcgcccagccttttttttttttttttttttttttttttgagatggagtctcgctctgtcacccaggctggagtgcagtggcgcaatctcagattgctgcaacctccacctcccgggttcaagcaattcttctgcctcagcctcctgagtagctgggattacaggcgctcaccaccatgcccggctaatttttttttgtatttttagtaaatacagggtttcaccatattgggcgggctggtctccaactcccagtgatccacccgtcttggtttcccaaagtgctgggattagaggcatgagccactgtgcccggttgcaatttttttttttttttttaatgccaaagaagaacagatgctggcaaggttgcagagaaaaggcaacacttacacactgttggtaggagtataaattagttcaacaatgtgaaaagtagtgtggcaattcctcaaagagctcgaaataccatttgacccatcgatgtcattactggttatatatccagaggaatataaaccattctaccataaagacacatgcacgtgcatgttcattgcagcacaattcacagtagcaaagacatagaattaaatctaaatgcccaccaatgacagattggataaagaaaatgtgtacatatataccatggaatactgtgcagccataaaaaagaatgagatcatgtcttctgcaggaacatggatggagctggaggctgttatccttagtaagctaatacaggaacagaacaccaaataccacgtgttctcacttaaaagtggtagctgaatgatgagaactcatggacacaaagaagggaacaacagacaatagggtctacttgagggtggagggtgggggtggaaggaggctaaggagaaggaaaaataactattggaaactaggtttaatacctgggtgatgaaataatctgtacaacaaacccccatgacacaagtttacttatataacaagcctccacatgtacccctaaacctaaaagttaaaaaaaaaaaagataccatggaattttactaaataacctgctgaatgttcattctcataattagtttatcaatactgtcaaaataaaagatgagggccaggcatggtggctcacgcctgtaatcccagcactttggaaggctgaggtgggccaatcacgaggtcaggagatcgaggccatcctggctaacatagtgaaaccccatctctactaaaaatacaaaaaaattagcctggcgtggtggcaggcgcctgtagtcccagctactcaagaggctgaggcagaatggtgtgaacccgggaggcggagcttgcagtgagccgagattgcgccactcactccagcctgggcgacagagcgagactccgtctctaaaaagtaataataataataaataaaataagagattgattccagttactctcttttaggtatgtactgcattgttattcatagcactttagaggacttgtcgaactaattatgttcatacaagtgtgtttccaaatatactgaaggcttaaggtcagaggtttgtatctctcttttttttttttttttttttgagacggagtctcgctctggcccccaggctggagtgcagtggcgcgatctcggctcacactgcaaactccgcctcccgggttcacgccattctcctgcctcagcctcccgagtagctgggactacaggcgcccgccaccgcgcccggctaattttttttttttttttttttggatttttagcagagacggggtttcaccgtggtcttgatctcctgacctcgtgatccgcccgcctcagcctcccaaagtgctgggattacagacgtgagccaccgcgcccggccttgtatctcttttcttttttttgagacagggtctcactcgtcacccaggctggaatgcagtgacatgatctcggttcacagcagcctccgcctcctgggttccagcgattctcctgcctcaagccttctgagtagctgggaatacagacacatgtcaccacacctggctaatttttttgtaattttagtagagagggggtgtcaccattttcccaggctggtctcgaacccctgacctcaagtgatccacctgcctcggccttccaaaatgctgggataacaggcgtgagccaccacgcctggctcgagatttgtatctcataactagtgtatagtagattattttattgtacaaacaaacagtgttttagtgaaactatgccagtttctaattaacttgttggtaaagttaggtaaatttgttagaatttctgggacctggctgggcgcggtggctcacttctgtaatcctagcactttgggaggctgaggcgggcggatcacttgaggtcaggagttcaaacccagcctggcaagcatggtgaaaccctgtctgtactaaaaacacaaaaaaattagcggggcgtgttggcgggcacctgtaatcccagctactcgaggctgaggcaggaggatctcttgaacccaggaggtggaggttgcagcgagctgaggttgcgccaccgcactccagcctgggcaacagagtgagactccatctcaaaaaaaaaaaaaaaaaaaaaaaaaagaatttctgggacctacattaaaaaaactaaaactgagaaagttgctcattttcactttggcaggacctttccatttcccacaccatttctgaaatcatatctgcaagttccttcagcacccaagatgtaattcttgtggatccagagacttgagcaactaactagctccttgaaatctgttaactatctttggtttgaattctatcataagcatgttatttagagcttgaagacccaagctgagctgggggtggaggggtggggctagggacagaaaggaggtaaatctgaatagatctaaataattttttttttttttttttgagacggagtctcggtctgtcgctcaggctggagcgcagtggctcgatctcggctcactgcaacctccagctcctgggtacaagcgattcccttgccatcgctttctgaatagctgggactacaggggcctgccaccatgcccggctaaattttttttgtatttttagtagagtcggggtttcaccgtgtcgtccaggctggtcttgaactcctgacctcaagtgatcctcccgccttggcctcccaaagtgctgggattacaggcatgagccactgagtccagtcaggtctaaatactttttgttatcttacccatctgtactcttattggaacatatttaaaagtcctttttgttgcctttaattatccacctattatgttcatgtttccaagtagacattctcttgtaaaccttagtttattctgaatttggctcttctagagagcgtaagtattaaacaatcatctctcacacttttataaattttttttgagacagggtctcactccatcgcccaggcggagtgcagttgcacgatcatggcccactacaccctcgactttctaggctcgagtgatgctcccacctcagcctccccaagtaactggggctacaggtgtgcaccaccacatccagctaatattttataattttcaaaatttttgcaatttcctttgaggttaacaaagctaattagaaagatatagttatgttcttttacaaatgaacaacttgtgacttcaagaggttaagtgttttgcccaagttcacaaatgtggcaaacctaacaactgaggaatcctaatcctatgatcctaaactacttctaatattaaaacgagtccaaagtagttagaattttataacttcattaaaagtatttgcaaaacacacttcagcaaagttctgtagtttgaggtgttttatcacaaaaactcaattcaaaaatgcttttattcaaaaatactcaagttggccaggcacagtggctcacgcctgtaatcccagcactttgggaggccaagatgggaggactgcttgaggccaggaccagcctgggcaacatggcgagacctccatctccataaaaaaaatacaaaaattagctaggtgtggtagcacatacctgtagttctgactgcttgagcccaggaggctgttagagtgagccatgagggtgccactgcaccccagcctgggtgacagagggagaccctgtctctcaaaaaaaatttttttaaaatatttaaataccttactccaatgctgggcattgtgttggactctggagatacaatgatgagcaaaatagatctaatttctgccctcatagagttgtctggtgatgacaaataatcatacaattgaccgggtgtggtggctcacgcctgtaatcccagcactttgggaggctgaggcaggtggatcacctgagatcagaagtttgggaccagtctggccaacatggtgaaaccccatctctactaaaaatacaaaaaaattagcagggagtggtggcaggcacctgtaatcccagctactcggggaggctgagccaggagaattgcttgtactcgggaggtggaggttgcaatgagccaagatcgtgccattgcactccagcctgggcgacaagagtgaaattgtctcaaaaataaataaaataaaaatcatacaattgtaaactaagaaaaacactacaggccaggtgcaggtggctcatgcctgtaatcccagcacttagggaggttgaggcgggcagatcacctgagggcaggagttcaagaccagcctggccaacgtggccaaaccccatctctactaaaatacaaaaaattagccgggtattgcaccgtgcgcctagtcccagctacttgggaggctgaagcaggagaattgcttgaacccgggaggcggaggttgcagtgagcagagatcacgccactgcactccagcctgggcaacagagcgagactctgtctcaaaaagaaaaaaaaaaaagaaaaaaacacaacaaaggctccatatagggtattacaataagagtgtgtaacaagggagcctgatctgaagcaagggtgtaatgtggaaatcaggtggaagctttaaggcaaaaaatacccatgggtctttcaaggaactcaaatgactaaaaagcaaggaggaaaacatagaggcccattttgagactgtattcatctttagagcaagcagcagctactaaaggttttcagctaccaaggaccacagtgagtgtagagatcagataggagtacctgtctattgcaatggtccactcagataaggtagttttatctaatgttatatagcaatggataatgctaatttagactaagatcaggacagcagaaatagaaatgaacatatttgatagtacacaaaactgatagtttttgatgaatggttgcaaggaagagtttatggtttgcacaacaggatagatggtagtgtcatgcacagtgacaagggacaaatggttgttctctagggaccaagtggcttttgtagaaggtaactgttggtcttactgatcagatatgctccaaacaaaaagaaaacgacaaaaccaagacttaaactcacacattccgaatgcaaatctgtaagacattatatggcttggacacgtggcatgatttaaatttatcacttctaatttttttctctgtagtaggtaggagcaaaataaggaagtctttaaagcatcagcctttaaacttttttttttttttttttttgagacaggatcttctcactctgtcaccaaggctggagggcagcggtgtgatctcggctcactgcaaccttgcctcctgggttcaagtgattctcccgcctcagcctcccaagtagctgagattacaggtgcatgccaacacagcctggctaatttttgtatttttagtagacgggtttcaccatattggtcaggatggtctccaactcccaacctcaggtgatacgcccacctcagcctcccaaagtgctaggaaaacaggcgtgaaccaccgtgcccggcctagactttaaactaaacagaaggtcattcttgacggttctgttgggttgctctagaaggaaaagacaaaacaaaacccagctctaacagtatcaatttctattaatctcaagcagaatttctggttatagctatagtacactaagggtagaggttcttaatcttcagtccaggattgataactcccctacagtagacaggaagatattggcaaaagcagaataacagaatagacacctcaggaatacactcaaaacagttagatttagccaggtatggcagcaactcatgactgtaatctcaatgctttgggaggccaaagcgagaggatggcttgaggccaggagtttgagactcgggcaacatagcgagatcccatctctacaaaaaataaaactagccaggtgtgttggcatgcacctgaagtcccagctactaaggaggctgaggcaaggaggactgcttgagcccaggagttcaaggctgcagtgagctatgaatgtttggtattccaaattttcaaatgtaccaaaattatcaatgtactaatacatattggtgctccattgtggctgtagctgaattatgtgatttttcccgtttcctaaactttcatatattttgaagtttaaaataaaaatatccatgtgtgtggttttacaagtgaataccccctttaaaaaaaagcttgatttgcagtttttcgctatacataagactatagtaaaaaaaaaaaaaaagatagaaacaaaccagaggtaatataatagtgcttgattaaagatctgtcagacagaaaataaccgaggataggcggttcaaacaacatacaactccttttaaaggatttttaaaatttttgcagcaaaaactatttcaaaatgatcacaataattttgaggtatgtccttacttggcttaagtctggacaaaaatattttaaatgtgtgcttacagaacatgggcagaactatttttgatggattactcacttctgaacattgttcttatgatcaaataaaaataggatacagctaagctttaaatatttgaaggtagcttgtttggactagacaatacctaactggccagcctacaaggaattggtaggtatacaaatatacaattattctacatactgtacatttgtatgtgattaaaatcctttttaaaataaaatacttcagaaaaattaaaagaccattaatcagtttctaggctgtccctttccatttataatgacacaaaaatattgctactaattttgcacaaatttaatatggaaatattttcaacagaataagacacaacaatgaaggcttcatgaataatttattccatttgaagttttgttttttgtttttgtttttttttttttaaaaagtataaaccttttcatttcctcaatcacaatttgtacaactcagtgttatggcattcggcagcaatagtgtttgttccttattctctttttgtcacgttaaaaagaaaagcaattggaccatattaaatgtcactgctaaacaacaactttaaaacgccccttcataaagtgaccaagctattttgagagggttgatgctgacatgtccagtaatgacgttacaatttgtagcttaaactcaataactttaaggtccacatatccagtttactttgaaaactaaagatgttttaaaacttcatgaatacatcaacctgaggagtattttaggtcccaaatccagtttttaaatttatactccacaaaaaagaaaatacatacataaaaatttaaaccacagttctgggcccattaaaacaccaaaaaagaccccccaaaaagttaagatttccagcttatttctggaggggtgggacaaaataagaatgtatattaaaaacatttttccttaattcagacaaactaaaatcttaagaggaaacccagaccaaaatatcactcatgcaacattaagtgtattaactgattgatatgcaatgccatagtggatgaatagcaaattatatgatgcaatagcatttaaaaactttttaatctattcaatttgaacattttaaataatgcaacatagtattctgatattacagtattaacatagtgcttgattaaagatctgcaaatctttgtagtaacacattaagttaaaaaattacctcagaaggtaaatatgaagacgaaaggagaatattttaatacagtaatctgtgccatactgacaattgagtacgaatacagctgaggatagttgactaagtagtaagagcttaattttagtggtttaagaaaagtttagaaatatttaaaaattacagctactttaaaatttaaggattacatataagtacacttggtggccttctggccaaacaataaggtgtacagaaatttattcatacagtgttaattcacagtcctgataactcaatggcttgcataagaaaggtatggctagatgtttctcactggctggaagcagacattatataactaatctttttaaatgacaaaatactgaacttccaccctgcttaataatcatggatacctgcacaaaaaaaaagatgttagcactgtaacaaagaagtcaaggtgttggtaatccactgctataaagtataatattttgcttacctatttaaacaaaactacccatatttgtctgtgacagtacattagtaagtcaaatccatcatcctgcacaaggcttaatttctcaaataagtctactgagcttttctaatggttatttaataactttccattgagtttgaatggatatatgaagggaagaaaaaaaatcttatcaataaatcctgtatatttgggaactattccctgattcccaaataaaaaataattgtgtactgggttccctccttatggctccatattaaataacctgtcagggaataattttaaatctactttcaaattgaggtgtggttatcataggttagtgattttaaacaactgagaatataacttttattttgtaaagtcactattaagtgtataaaaaggatactctttttatggaaattccaaataagcacattttccttcaaatctcagacaagttttttttttttttttaaagaaagtacagaacaaaacataccaacataatgtgtggtgtattagcataatttaaaaacaaatgcagagaggtgatctttaaatttaatatcaaaatatgctgaccattagaactgcattataattttgaagaaatgattgacaacctttgtcaccaattgtgtttgcttcatagaaaaaacaagacttgctaatgttttcatatacacaatctgaagaagttatgttgttcataagaaagtgatatttaattctaagcacagagtattcacaaaaacaagtttcagtaaaaaaaaaaactaaaacaaacactgaagtagagttttgtaaatacaactgattttgtccttgtagataattagtgaacgtacaaatagaaattttgctagactgcttccaagaaagctaggtagactcggcgactgtgaattcaagtcagcaatgcaggtaggaggcgaacttgggctcttttgtgagcagcactgtagaaaggatttttcaagggggtacagcctgcataaaagcagttatcttggcatgtgcaaacaagaagggggaaagttgtattgaaggaggggtgaattaaagtccctaaaattcaagtcccttctttagggaggtgagaacctccttggcatatgccctaccttaatctgagctgtgttatagaaaagtacagactctggtgtttgggactgacatctccaaaccaagaaaattaaataaataaaaaaggcaagggaagtttaaaaaatggttctttcactagtggaatagagtctgaataccagaattcactgagaatctatttacaccacagtttgattgcgcgcacacacacacacccatacatatgcatactctcacatacattcccaatctttaatttaaaaaaaaaagtcaaacaatcaagaatgactgcttgaaaaataatttgtaaaatgcctagagctgggctaaatttcaaccttatagcagatcctgaaaataaatttcataataatatttccatgcctaaatatgccactgttaaaactgaaaaaaatttaagcatgtaacattaaacactaaaattagtttaagcattcagtagcaaatggtttttcttgtaaaactaagtttctttcaccggaaatggcctgaaatattagtcatagccctaaaccatagtacaaaatataactgaagaattctcattttattctaagttaaaccacctaacaataccacttgtatattgccatcatgttattctgtaaagatgtgatatataaaatgctgtaagacctggtaccttttcaatttataaacacagtgaacttcattactgtacatgtactctgcaactacagcttagctgtaaatcctccacacacaatggtatggacattattccccctctatccccgttaaactgtacatcgagacaatacaaatttactgtcccacccacccccttacaaaaaaataatactctaaaagcaaccctactgcaactttttaattaagacgattacatatattttagaccaattgctttaaagcaagaaggcagtataaaccttctaggaaaatttttataaaagaggttaagaaatataagacaatttatacatttaaaaacttacaataaataagagaagagatgcaggcatttttgaatactagatactataatccatacaagaacatcttcatgttctgaagccatatgttgaaattcattgttcctcatgtttcctctccatgcttttaatattcatttaacatgactgggtactatggctcattacttttcacaaatactgtgactggaaaaaaaaaaggttaattttgctacgaaaatgttataatacgttttgtatgatcagtcatcatcctaaagagttcaatagagtcaatgaaaaatagcagggttatagcccctccccccaagtcaaaacaatatttgttgaagtaataagaattagaccccatcacaaatgaccttcactgagaagataattgtaacttaatcctgcagcgaaacatccatttttccttgttcttttcttgcacagttccatcaaatgaagatcacagcatattcataataaagttatataactgattcagcaccacaaaatgaattgggagacatgagcgtctgtcctgggttgcagggtcacaggttagccaggagagtgcattgtactgttccaaaacaaacctgaaaagcaaataaactgcataagtcatttatttatttccaacctagattttggaagcagttttcaattatggcatttaagactcaaagtcaccttaaaaaagagtgtaacagagagtccttgaggggaaagaagcaatttccataaaaattattctcaaaagtagattactcaagttagaatagcagtgtttatctagagatccactggtacacaactgtaaattcttgccaaaaatgagaaaaatatataagaatcaacattatattcttttaaagttgcagtgacaaactgttaatggtaaaagagttgtacctgaggacatctgaagtctgatttgagtcaagtgggtgggagtgtttactgtgaagcagctcgtcagattgcactgaaggcacgtggaggtgcaaagaggcctaagaaggtaacaggtaatcaatcagtcagccaaacagaaaataatctgctatttagttttaccttattctcccaatatatcttataaaatgatgaaatacattttagtcctatgttatgaatgaaagccactataaaaatgcttgttctcttttaactaattcattatagaaatgtttttttttttttttttaagtaggggcaggttcttgttctgttgaccaggctggtcttgaactcctggcctcaaacaatcctcctgccttggcctcccaaagtgctgggattacacgcatgagccactgtgcctagccagaagtgatttttaagtgcaaaacttactttgaatctatttccttttctttagctttattgtttttgagaccatacaataatccttagaaaaagaatttctaattacctgctaagtctaatttgcctagatgtgcaaagtaaatgtttaaggaggcactaaattgagtagttaaacctgagtagtctgtccttaagatatatgacaccctttatgactacgcagacatacctacgtctagcactgaaaaaagtaacaggaataagcataagcaaatagtttggttacagcacaataaaccttaaacaagctatcttcggttgaactgagaacactctaagtaatacagtgcacagatgcctgctttgcccactcaatttcataatagagggtaggtaaaaactggcacactcatttagatatggcaatgaatagtgggagaaaggaataaactactccacactccaattaaatgagtcattttttttataagtcaatatagtattaaaaagctatgataaaacaatggtgatgttcactgcagtaactcttggtagatctcattctgtacactgtataaggtactattttatatttaggtgttctctcctctgcaactgcaatacatatagaaactcatgtagtacatttaggaatataaccaaaaatagctatgtttcaactgtctacaaactcttgatttatggagttataagcaagtctcacactgcaaatcactacaaatttttaaaatgtaattagtaccagtactctattcctatgataaaaagggatctagctaacaacccattatatttccaagcaaagagaaacaaaccaggtggctttactgcctacagtataaaactaaaataagatatatgaaaaaaaaaagtgaacaaaaagtatggtaaattatgccttaggtgatagttcataaccagaagtcctaatcttgttacaatgtatctaagggtgaatgcccgctttatactatcctttctgcaaataaatactgagtaggaaaagctctagatagtcccttggactttttgtaaagttgtgtttcctgaacacatcccctgaaacactaagataataaactattaacaggtgttaaataatcctttccttgtgtattaataagtttgggaaatgctaggtaaactatcttatttacctctgtttttcagactttagtgtgcatacatgtattatgactagaaaagaggacagatagcatgtgtagcaccctcccaaaggaccaaagaatcctttgttttgtggagacaccaaagactactagtatatagaaaatccctgacctcaggtgatctgcctgcctcagcctcccaaagtgctgggtttacaggtgtgagccactgcacccggcagcaagtatttaaattagcatgacttgtggattaaaaacagtcaacttccggtggttttacataagaataagtgagtcacggccgggcgcggtggctcacgcctgtaatcccagcactttgggaggccgaggcgggcggatcacgaggtcaggagatcgagaccatcccggctaaaacggtgaaaccccatctctactaaaaaaatacaaaaaattagccgggcgtagtggcgggcgcctgtagtcccagctacttgggaggctgaggcaggagaatggcgtgaacccgggaggcggagcttgcagtgagccgagatcccgccactgcactccagcctgggcgacagagcgagactccgtctcaaaaaaaaaaaaagaataagtgagtcacatctaaatttgttattctggaacaatattagcagcagtaatataattctgtatagggcttttatatctcattttgtgacttatctccacttcatgttacattgcttactaacaaattcggttttgtttttttgagagagggtctcctgtcacctagctggagtgcagtggcatgatcatggctcactgcagcctcaacctcttgtgctcatgcgatcctccctcctgccccagcttttcatgttattaggactataggcacatgccaccatgcctaatattaaaaactttttagagagacaaaatttcactatgttgtccaggctgatcacaaactcctggcctcaagtgatcctcctgcctcgaccacccaaagtgctgggattataggggtgaatcgctgtgcccagcctgagtttgttgtaataaatcacgatgaatctgagagtctcattactgtatttaaaaaccactcagtttttttttaacacagcaatctacacacagctagaaaaacttttttaagtagtaaatgaaactaaaaatcaagtattacaaagattataaatcttttttttgtttgtttgttttgagatggaatctcactctgtcacccaggctggagtgcagtggcgcgatctcggctcactgcaacctttacctgccgggttcaagtgattctcctgcctcagtctcccaaatagctaatttgcacgtgccaccacgcctggctaatttttttgtagttttagtagaaacggggtctcaccatgttggccagactggtctcaaactgctgactttgtgatccacctgcctcagcctcccaaagtgctgggattacaggcatgagccactgcgcccagcccaagattataaatcttttattccccaaaataatgcagcataacagcagtgcagtatgatgtaattcaaagaataacataataatcattaaaagacccaggtttcagtcttgagtctattaccaatttatgactttaaacaggtgagtttttctgaacttaaatatgctcacctagaaaatgagaaggttagacagaggtaatataaagtttctctcagctctaaatttccatatatgcagttgaaacagattgagcatctccaatttgaaaaaatccaaaaatggaaacaattctggtcccaagcatttcgaataagggatactcaatctacactaacaacaagggccctaggagtttgacttaggaataaagttctaaaaatataaatttaaaaactagttgttttttttttttttgagacagagtctcagatattgtcacccaggctggagtgaagtggtacgatctcggctcactgcaacctctgcctcccaggttcaagcgattctcctgccttagcctcccgagtagctgggactacaggcgcccgccaccacacctggctaattcttgtattttcagtagagacgaggtttcgccatgttggccaggctggtctcaaactcctgacctgaggtaatctgcctgcctcggcctctcaaagtgctggcattacaggcgtgagccaccgtgccttcgtgatcttgtttaaagagtcacatatggcagtgcatttaagaacttagacaagctataagacttaaaaaagccacttctatatttctcaggacttaggctgtcaatcagaattatttaggaactgggacagaaatggcaataccttaagaaaaaggggacactgatattgtgcttgaggacatgctgaccagaaccagtcaggtaatggacctgctttggcagttgatacaaagtaaccaagggccaatggttgctgaagaatattaggtacttcctcatgaggttctgttgatagtagccgatcagtactctgacccttaaaaagacaaaattaaaagtatattagttcactcagtgtaactaagtaccagatataaacacagaatggctcatagcaatcagtctcattatcttatgacatcgatttaataaaatactgaaggatattgaaaaaaaaccagtttctatgtacttaggagtattataagtaaaagcattaatagaacatattttaaggattgcatgatatgccaactgtttaacaagtctgtattattatgccaagttcacgggaaagtttgtaaaacttcacagatgagtaaaaaatacaaaattttcaatgacatctttaacttttttgctaatattcctttaagtcctgaaaaccacaccccaatcaaaaggtggattcaatttagctttgttaatctagcactatctataaaatgcagttaatagtgttgtgaaaattattatggcaacatgaagggacaactaccaagtcacatgcatatcctttggattagttaatgtatttcttggtatttaaaaatagataaaataaaaataatatgcatgaaaacgttcattacatcattatctataacaaaaaaaaatcttacatgtccaatattttgggaaggacataaattagggtatagcaaaaatgcaatatttaaaacctcattatacttattgaaaattgcaacataaacgtatgtggaaagaagataatttgcttaaaagtaaaaatggttttattaaggtggtgggattactggtgctttttgttatatgtatttcctatctaatttctttgcagttacaaaaaggaggaaggaatgcaaagtaagactggaaagatccttccttactttaaaagggtaaattttatacctatgcatactacaataatcaaatcaccagtatatataatttcttttctttttttttgagatggagtctcgctctgtcgcttaggctggaatgcagtggtgcgatctcggctcactgcaagctccacctcccgggttcacaccattctcctgtctcagcctcctgagtagctgggagtacagacgcctgccacacctggctaagttttgtatttttagtagagatggggtttcactgtgttagccaggatggtctcaatctcctgacctcgtgatccgcctgcctcagcctcccaaagtgctgggattacagacgtgagccaccgcgcccagcccagtatatataatttcaaatagagaggtgttattaactgaagcccagttcgtttttacttcaaatataaggacaagacagcctgcttccataactgctaaagataaaaagggggagtagatggtcagtgttttatctggtcttatgagaaaattaatatttttattatattccttgtcacagccctgatatgaatggctgctcttagagttatatatagtgattctgaaagatactgtgatcctacatctgagtaaaaagctatggtgaactgccacaaaaactacaaaaaaatgactaatgccaaatggtctagaaaatacggattcagggaaagtagagccttagagattctcttaaaaatgtgcaattcaaagtactgatgtccatgatgtagaaatgcatgaatgtactgttaattaatctcaactcttgctaatttccaaggaaaaatagtattgcatttcatatattaatccattactaagttaaggaatggcaattggatgatctcggctcactacaacctctgcctcccaggttcaagtgattctcttgcctcatcctcctgagtagctgggactacaggtgcgtgccaccttacccggctattttttacatttttagtagagatggggtttcaccatattggccaggctggtctcaaactcctgacctcgtgatccacctgcttcgccctcccaaagtgctgggattttaggcgtaagccactgcgcccggccgagaaaaactaaaacttgtaacacagttaccttgcccgcatcacctccatgggggtaatgagatcctggagaatgtacaggagaaccagttggagaagcaggaaggatattaatgatatcagggtcaagatcatctcctgtgtctaacaaatcaaagatacccattccatctgctccatctaaacaggagaaagaaaagaaatttaaaactccattttccatatcctatggtcattcacaggaaagggtcaaaataaatgaaattttaaccaaaatgggttaatttaaccaacatttactgagtgtctaccatgtgccaagtattgtgctaaaagccgtacaaataattatgcataaacaagcatgtggtagtctgaataatggccccccaaagatgtccacatcctaatcccaggaatctaagaatatgttaccataaaagactttgcagatgtgatcaagctaaggatcttgagatggggagattattctggattatccgggtgggtccaatgtaatcacaggggtcctaataagagggaggcagtagggttagagccagtgaaggagatgtgatgacactatactgctggcatccaggatagaggaagggaccatgagccaaggaatgcaagtagcctgtagaaactgacaaaggcaaggaaacattttcccttaggacctccagaaagtaatcaatcctgctgatattttgactttggcccagtgagactgattttggacttctgacttccagaactgtaagataaaataaatgcgtgttgttttaagccactaaatgtgtagtactttgttagagcagcaataggaaactaatacaaagcaaacatagtacaaacaaaatgaaaatgtgtttaaagtgggactacagtattcccccttatccatggggaatatgtcccaagacccacccccatacccacatagattcctgaaaccaaggatagtaccaaatcctatatactggtttttcctttacgtacacacctatgatggagtttcaatgataaattaggtacagtaagagattaacaacgagaatattagaacaattatagcaaggtactataataaaaggtatgtgaatgtggtctctctctctctctttcaaactatcttattgtactgtacccatgggcaactgaaatcatgtaaagcaaaaccaaagataaggaggattactgtatttacgaataataccatgttctttattaagtaaaatattcgagttattatataacacacgaaaacaagagagcataataaccatacttgtgactttagagatgtgagagtttttaaggtagctcagaataacaataaaatcttctttattttctcttctactaaaatgcaatctataaattcacctggaaaagctacgtccctactttggcagtttatataaattacattattttggcaaatcaacataagagatatataaaatgagttcatgtacaggtacctcaaaagcacaagggtaaacctatacaaatattttgtgaccaactattgccttttaaaataagtaaagatggctgggcatggtggctcatgtttataatccccgcactttgggaggccaaggtgggtggatcatttgaggtcaggagtttgagaccagcctggccaacatggtgaaaccccatctctaccaaaaatacaaaaattagccaggcatggtggcatgtgcctgcaatcccagctactcgagaagctgaggcacgagcatcgcttgaacccaggaggtgaaggctacagtaggctgagatcgtaccactgcactccagcttgggagacagagtgagtgagactctgtctcaaaaaatttttaaaaagtaaagatttatgggataattcacagcaccagttctgatatcaacaaggtgaaagaatgattgtattagtttcctgttgccactttaataagttaccacaaactgttggcttaaaaacaacacatatttattttcttacagttctggaggccagaagtctgaaatcagtttcgttggactgcaatcaggatgttggcaaggctgaaagggataatctgtttccttgtctttttcagagtctagaactatattctttggctcatgggctctttcaccatcttcaaagtcagcaacatagcatcttctccctttgactttgcttcccactgtttccaccacatggctttcttctcttctatgtagtcaaacctccttctgcctccttcttataagaacacatgttatcgcattaagggcccacctgcgtaattgaggataatctctccatctcaagatccttaacttatcacatctgcaaaatcattttttggtaaaacaaggtaacattcacacgtttcaggtattggacatgaatttattttggggggtattcttcagactaccaaaatggaacaaattacgtaccattgttgggattgaaagctaaatccaaattttcagtggtataagtagctgaagctacttgcacagaagcagaagtaggaaacacaagtatatgagtacatgatgtatcctgtggggtatttagctgagatgtctgcatatttagagtcgtgcttcttccaaatacagaaccagttgacacagaatctgaaaatgaaagacattttttcttttaataaacgaagaataaattgtatataatacttaaaaacttaactgcataaagaattaaatctgatataaactaaagatagctaacctggcataataacaaaagagccttgcggctccattgccaccaagcaagcactgagaatgctaggggagtctgcagcagatataccacacattctacacatgtctttgagccttttacttagagactgcaagtttcgacgactcagcaaacagctccaatctgtgggtatcaacagtaaaaaaaaaaaaaaaaaaaaaaaaaatcaaagtaacagcattattaatatcctgtagaaccaagttaaagttaaaatataaaaatagttaatggcttttaaattagtgtattcctccaacacgagtcatcatcaagccaaaattcttactgctgatgctactgaacattctttatccccctaatattaggatacaccaaattcaattggtatctgctcaacagaggatgagttaaataacaatcagaaagtggaaaaaacagaaaacaattaagaacagcagtaataagactgatattaaagttaaaataagagtaaaatgtctttttaaaatttgaattaagccatttgtggcctagacatatgtggttccttatttgataacctttgcattttattcaacatatatacctagacgtggtcagaactgtgtgtgaatttacataaaacggaaatataaatactaataaaagcacaattttacctttcaattctccatgaccaatccttcctagacgaccaattacaactctccatggcaatgaactcatttgtacaagtcctaagcaccactcccaaagtttctgtagaccaaattttctagcagaactttttttccgacgagccctattgtgtgaataaagagagtgtcataaatatttctaaaatttatatgattttgctgttgttgtttttttgagatggagtctcactctgtcacccaggctggatggagtgcagtggtgcgatctcggctcactgcaacctccaccttcacgggtttaagtgattctcctgcctcagcctcatgaatagctacaactacaggtgtgtgccaacacacccagctaattttttgtatttttagtagagacggggtttcaccgcgttagccaggatggtctcgagctcctgacctcgtgatctgcctgcctcgtcccctcaaagtgctggattacaggtgtgagccaccgtgccatcccgacattttaagagagctcaaatttgtgaaaaacagatctccttaattttagtgcttcacaaaacctttacgtaagtcctaagcgagaatattcataaaatcataggtttggcatctgagtttgcttttctatttcacattataatatataaatttttaaaaaaatttgtctataaaacacctcaattcatcagcaatactgctctacgccagggattttttgtttttttgatggagtctcactctgtcgcccaggctggagtgcagtggcacaatctcggctcactgcaacctctgcctcccgggctcaagtgattctcctgcctcagccttccgagcagctgagattacaggcacacaccaccacgtctagctaatttttgtatttttagcagagagggggtttcaccatgttggccaggctggtctcaactcccgacctcaggtgatcctgtctcagcatcccaaagtgttgagattacagacatgagccactgcgcctggcccagtaaactttttatttttttttttgagacggagtcttgctctgtcgcctaggctagagtgcagtggcatgatctctgctcactgcaacctccgcctcctgggttcaagtgattctcctgcctcagcttcccgagtagctgggattacaggcgcccgccaccacacccggctaatttttgtatttttagtagagatggggtttcactatcttggccaggctggtctagaactcctgacctcgtgatccgcccgccttggcctcacaaagtgctaggattacaggcgtgagccaccctgcttgacccagcaaactttttttaaagagccaatacttcaaatggaaatagccagatttggtccatgggctgcagtaagcaatccctgttctatactataagttgaagactgaccaaaacaccacacttctcagtccaaacaacattgttacatgttttctgcatacatgtccttcactagccaaatatgcaacataagcactctttggctgagcaacagtggctattacttttttttcttttgagacggagtctcactctgtcactcaggctggagtgcagtggtgcgatctcagctcactgcaagttccgcctcctgatttcacgccattctcctgcctcagcctcccgagtagctgggactacaggcgcccgccactacgcccagctaatgttttgtatttttagtagagatggggtttcactgtgttagccaggatggtctcgatctcctgaccttgtgatccgcccgcctcggcctcccaaagtgctgggattacaggcgtgagccaccgcgcccagctggctattacttattatttttttgacacggagtctaactctatcacccaggctagagtgcaatggtatggtctcggctcatggcaatttccacctcctgggttcaagctattctcccgcctcagcctcctgagtagctgggactacaggcgcgtgcgaccacaccccactaatttttgttttttggttatttttgagacaagagtctcgctctgttgccaggctggagtgcagtggtgtgatctcggctcactgcaaccttcgcttcctgggttcaagggattctcctgcctcagcctcccaagtagctgggactacaggcgtgtacgaccacacccagctaatttttgtatttttagtagagacagggtttcagcatgttggccaggatggtcttgatctcttgacctcgtgacctgcccaccttggcctcccaaagtgctgggattacaggcgtgagccaccatgcgaggcctaatttttgtatttttagtatagacggggtttcattatgttggccaggctggtctcaaactcctgacctcaggtgatccgcccaccttgccctcccaaagtgttgggattacaggcataagcaaccgtgcccagccaacagtggctatgacttactgagcacttactatgtaccatccattgtgcccaatcaatttacatgtaatacctcatttcatcctaacaactctatgagacaaataaaattatcctctagactttacagataagtaagctgtatctcagctgcataagggtagtttttccaaggtcagtagtggcaggtttgggatttgagcccaggtctctctgactccatcactgcccctcttttttttttttctttaagacagactttcgctcttgatgcccaggctagagtgcaatagcacaatctcggctcactgcaacctccgcctcctgggttcaagtgattctcctgcctcagcctcccaagtagctgggattaaaggcatatgccaccatgcctggctaatttttttgtatttttagtatttttagtagagtcagggtttcaccatgtcagtcaggctggtctcgaactcctgacctcaggtgatccacctgccttggcctccaaagtgctgagattagaggcatgagtcaccatgcccagccccatcattgcccctcttaaccattatctcacttctactttatcaaggtagtaaaatgataatactattttgataatgaaaagggtggtattttttttctctactttctcatacttcacagattagcatattctttcccgagttcacttaatcagtataaatatccaattaaaaaaatcaaaattgtatcaaggaaataagatacgaagcactgttctaaggtttataatataaagcttaacatacttgttaatgtttataatcaataatataaaattaatgtttctatcttctgcttccccagcaccattaaagacctaataatcattagatatttctgcatatatttaacttctcacctaaaaaacaagcttttatataataaggaagaaaataaacgatagaacccaaatcttttttttttttttttttttgagacagggtcttactctgtcgcccacgttaaagtgcagtggtgcaatctcagctcactgcagcctcgacttcctgggctcaagtgatccttctgcctcagtctcccgagtagctgtgactacaggtgggccactatgcccagctaatatttgtatttttgtagagacggggtttcgccatgttgcccaggctggtctcgaactcctggactcaagtgatccgccttgtctcagcctcccaaagtgctgggattacaagcaggagccaccacgtctggccagaacccaaatcttaaaactaaaaatcatttcacgaatttgcttttcaggttctcctgtacagcgttcactagccttgaaaacatgtttcaagtctctactaaaggcttgaaatgtttattaagtgataactcaaaatgaggctcacctgttgtgacctattagttatatccttcgtaaataactgggcgtgatatttactgccaagaattctaaaatggtcatcatattctgaagacaaccaaactttttttttttttgagacagagtctcattcttgtcactcaggctggaatgcaatggcgtgatcttggctcactgcaacctccgcctcccagagattcaagtgattctcctgcctcagcctcctgagtagctgggattataggcaaccaccaccacacccggctacatcctaacatttaaatgataaaattttaaatcgccaattttagtaaatgaagttaacttactcagtttattaggggctatatcttagatggtacatgagaaaagtttaaatgttctatagatactttactagaccatttttttacatctttcaaaaatgttcagctaaaataattgcctcaagctttatgacacagaagttagtgaccttaatcttttttgttcatataatagattaatcaaaattatttttaattatgttagttatacaatataaacattcactaaagaaaaaagtaaaaagcacccacaaccccacatcttaatattttaatatatataaaaccttcaaactggttttctattcattaaaaatgaaacaaaatgttacaaatggaatgatatgatatatttagggaaatacaaatacctatttggaacatcgatgttaatgatacaagtttctaaaagttctccatatagatctgtgcaagatgcaagaatccacctttgatcatgtgataaacagtatcccacaaaaagaacattatatttctgtccagcttctccaaatgtttctcctagctctgtctgtttgtccttcactggagccagaataaaaggaggtgcataaagtcgaatacactctggtctctataaaataaaaaattaaggtattatcatactatacaatcttagagaaatattgcatttaaaatgtaattcttatctacccaattataagataattggaaaatgacagctaagccaaaaattgcacttagttttgcatagtatcataaaaatgttggcagggcacggtggctcgtgcctgtaatcccagcactttgggaagcacaggtgggcgatcacctgaggtcaggagttcgaaaccaacctggccaacatggtgaaactcctcccacacacaaaattagctgggcaaggtggcgcatgcctgtaatcccagctactcaggaggctgaggcaggagaatcgcttgaacccaggaggcagaggttgtggtgagctgagattgccccactgcactccagcctgggtgacaaagcaaggctccatctcaaaaaaaaaaaaaaaaaaaaaaggtatgtatagtcattgaacttcggtcatgaaaaacatatacttacatcaggacttctaagggcagtttccatggctaaacctggaccaaagccagtcaatgttttcacattggttgatgttggaagtggcctccgacactgggtaaaggccgaaaaagccagggattttaaatgctggggatagatttctctatcttcatgcttcacaggttgcaacaggtactgacaaggaataatctaagaagtataggcaaatattacaaatgttaaacttccaaaagagaataacaggaactgtgggtctaaaactctaaaaactttttactagaaaatttacacaaaacctaatttaaatgaaaatttaacgattgttttcttatctattatgtaggcttttaataagtagccaattttaccaatgggttctgaattaaaggactatttaaaacctataaaactttctggccaggtgtggtggctcacacctgtaatcccagcactttgggaggccgaggtgggcagatcaccaggtcaagagatagagaccatcctggccaacatggtgaaaccctgtctctactaaaaacacaaaaatgagctgggtgtggtggcatgcgcctgtagtcccagctactcaggaggctgaggcaggagaatctcttgaacctgggagctggaggttgcagtgagccgagatcacgccactgcactccagtctggcgacagagcgagactctgtctcagaaaaaaaacaacaacaaaaaactgtaaaattttctatataacaattatattaataatgccattgactagtcctgttgaagtctataaaataaattcaaaatttcttctaacaacttaatatggttaattgctttctccttttcttgcaacctgtcttgtttaggtacatgctacatttttctatttaggctcatgaatttaaaaattggcttataaaagtaacacaggagaaacatttaatgtacttaatggaatttttttattctgtattattactgtcatatgactataaagtttatcttttataaattctctaagatttatattatgatattaaagtaaaatcaatataatagaacttggcttttagataatcaatttgaatacagaaaagtagtatctgaaacttctgacaacattaaactgttttacataattttaactcacaacatctatcactcttacctgtacagaaacagtactcttgatatgaggaggaagagtctggaccatttctagaaagcatcgaagtagccccaatgtccacacactagaagagttagtgctctcgtctgtattttcgtatgtaaaaggatcaattatataaacaacaattgcaggtggatacgtgactgcatgtgaatcaccatctgtggggattcccactttatcccgatccatcgtgctaaaatttaaggtagaaatgagacaaaaagttgtactgtatatgcttggggtagcatctaagcaggttcttaatatccccctcctccctcttttttggtgaaaggtgtcagaaagcctctctaaaaatgaaggacatttctttctcgccaaaatgaaccataaacattgtacatacaatttcacagtgtataaagacacttgccttaagaggtcttgccttaaatttaccaaaaaaaaaaaaaaaaaaaaaaaaaaaagaaagaaaagaaaaaaaattcttaaaaccatagggtaagggtattagatacaaaagatggcttagagtttaagggataaaactgagacaaagataggtctctttgtctgaggctatctcaaatagcttaccaaatttataaaggtggctacaggtagagctaggccagaaagaaaccacgtttccagacttatttaatgttctagtacattttcagactctctctctctatatatgtgtatatatatatcttttttttgagatgggagtctcactatgttgaccaggttggtcttgaactcttggtctcaagcaaccctcctgccttagcctctcaaagtgctaggattacaggcatgagccacttcacctggtcccatttttagactatatacatttatttcatactttacagcttcaatggtgtacaagtttcattctttgatgggtgatttgatttttttacacttcaaatctattcatatgttcaagatgagtgtatcaatctcgataatggtttgtttttacccacatatgagtataattttgggcacaactgcatcctgggtagctgacagatataattaagctctggccaacttggcctataaatcaaaagggaagatcaaaaccttcatcaaaaaaggaatgagagctgtcataatcattcttgtcactataaataacttggaatcactgtgtaaagtacttaatgtatattatatcatattactctcatcttacagataagaaaacatgctcagaaagttagagtttccccgaagtcacaaagcaggtaaatggcagagctgagattcaaacctcagtacaactctaaagcctctaaatagagtgggtcaatagtgacttctcaatcaccagagtgatttgcacaggcaaatctacttgacaattatgccacagaagactcaaatgtcatatgggtatctggactatatggttttcaagctcttaattcccaccctcagattctagaattctatgatactttatgaagtaaagtcctcattataattttatacataaaatattcaacactaggccgggtgcgatagctcatgcctgtaatcccagcactttgggaggctgaggcaggcagattgctgagtccaagagttccagaccagccagggcaacagggtgaaaccacatctctacaaaaaagtagctgggcatggtggtgcatgcctgtaagtcccagctactcaggaggctgaggtgggaggatcacctgagcccaggaggtcgaggctgcagtgagccgtgatcacgccactatactccagcctgggtgacagagtgagaccttgtcttaaaaaaagatacaaactaaaatttcaagactaagataaaaaagcactttatgctcattcaaaacgtcttatttagaaaaaaagcagcatggctgggcgtggtggctcacgtctgtaatcccagcactttgggaagccatggtgggtggatcacctgaggtcagaagtttgagaccagcctggtcaacatggcaaaaccctgtctctactaaaaatacaaaaattagccaggcgtggtggcacatgcctgtaattccagctactagggaggctgagggaggagaatcacttgaactcgggaggcagaggttgcagtgagtgcagatcccaccactgcagtacagcctgcgcaaaagagtgagactgtgtctcaagaaaaaaaaagaaagaagcagcatcatagtttttatatttctgcaaaaatcagtatttttaaaggtacctttcagacacatcaggatgcggctgagtgggaagtgaagatgattctccagaaatcccagctgtctgtagagctgatgtctgttgccctcctagctgaccactctgaactgtatttgcttgtgtagacatggatcctgcagcattactgttcatactgccaaagggtggaaacgaaggtagtttatttgatgatactccactattcaagttggaggatgatgaagatgaagttgaagctgtggtcaaagttgaattagctgtggcaactgaagtagatatggcaacacctgaagtcactgtcatagtgctgctcgctgcagatgctaaggtggcagatggagtattagcatttccagtatttgtcatctgaggtggagtaatcaaagactgacttgtaggggcaactaaatttggctgggaaagtagagagctgtccaatggcagggaagcaagataaggacctaaagaataaaaacaggtacgaaatttaattctttatttcactgactggtttttttaaattctactgtgtaaacagaatcataatccagttgatgttttcttggtaattatagccccgaaattgcttgctaatggtgtgacctacacttgctttctattttcccctagagactgaagaaacatatttaaaatggaattgaaaaagccagaattttcactcaaaattaaagaaatgattactatgaaagtgtaacaaaattctattttctaagtataattaaatgtaaaaaaggtatctagcaatattcatcaaactattcaaagggtttctaaatcacaaatcaaataaatattgactacattgacagctaattaaaatataaaatggtataatgttatggggttcaaattataggaatgtctaatgagattcaatattttggttctgcatctctttggattaagtctaaaggaagtccactgatctttattttcaagagtatttataagcaatacagttaggcacgggtagaatgaaagaaaaaaagtatgtaacaagcaagtcttaaacagctgtcgttttcttagctacaacaaagaactatttcttggtttggtagagattaactataaattattttatctctaaactgtaacaaatgaagaatcttcaagttattaaaacatcagaccctacagaggcaacagaaaatttatttataacccataatttcttcctacctgatgggatccctcattagggatcagcaaacttgttctgtaaagggtcagataataaatatttttgtctttgcagccacacagtctctatgaaaactactcagctccaatgttgtagcacaaaagcagccagagaaaatacataaatgaggatggctgtgttccaataaaattttatctacaaaaacagctggtggagcaggccacattttgctaacaccagccttatacaataaatacaaattcaatacctaggtcatatctgcagacttgtgcataaagcttgagtttagaaaatgcttcattgttaccgtcagctgcctgagaaaaccattctgctaccaacttttctgatagtttctttgatgcagtagatccaactctcatgatcccatctgttaacagtcgagaaacaggtctatgttgacctaatcgacaggactacaaatatacatacagaaagcagaattagtaaatttattattgtatttagatacacattataaaaccaaccatgaaagctacttaaaataagcttaaccatttgcaattaacagttatgataaaaatatcaagggtgtttttagaagtaggccaaaaaaataaacatatcaagggtgaaatggtgccataggtctttttcatttttacattagaaattcattaattttttttcaaaattaaaatatctctaatgaaaaaacacctagataacaatagtactagaaccattttgtttgaataaaagcttgcagaatgcagacataagtgagcataaaaatgcagtcattttaggtatacattaacaccaattcatgaattatgaatacaaatatccctaaatcaaagcaaaataaaaattgttatacaaatatatttatacaccttctccctctagttctgtgagtcactgatttttgttattagaagcccaatgttaaataaatttaaaacattggattaagcaaacttagaagagttctttactgtaagaatttcaaagcctttaaaaacctaatatgaattgtaaatctctaaaaggtaatataatatacaatgtttccccaagcctatttaactatggaactttttctctgagaggattttaccggactgatattccaaataacaccctttgggaaatgtttatttattaaaaacacactacaaataccttgtaattatgtggaaaattttaaaaggaagctaaactaacatacactaacattcagattgtataaggaatcaaaatttaaagactaaatttcgaagcctttgtggaaaaaggagggaataataaagtaagactttatgtcccataacacttataatttacaattattgcgcctggtgatggatatgtgagaattataacttaaaagaagaggcaagaatttcagacctgaaatggaccttagtgatatctagcatagatttattttacatatgaggaaagtgaggcctagtgtcactacctgaaatcctagagaataaagactagaatttttgtaaatgtaacttttttcctggctatttaacattgttaccctttgttttagaaaaagccacattaaaagggatatatatctatatgccctcaatgtttcttcctcctatagggggatagccactctgacccacggcatacacatctaacagactgggtcaaactcagcaaagaatgtaactggctagtatgagaaataaacatctaatctgacatcatcactgtgtcccaatcaactgaactgcccagtatgctgtatatacaacaatacaaatcgtaaggtagttttaaaatgtcatctctttttaaacacctacctcatatattgcagtaagatctctaaaaaagctttttgctccatttaacaaggcttcattttctggacacagtacaacataggctatatctctttgagatccatagggttccagcataagtctctcccaataaggaagagcaaatggagaaagcaccagataatcataatcataacccaacaaaaatgtggggattggcagtggttctggggattcatcagttcctaaataagaaagatgtattttaagaaaacacttaaaaacaagacatgtctcctttttatttatttatttatttatttattttttgagacagagtctcgctctgtcgcccagactggagtgcagtggcgccatctcggctcactgcaagctccgcctcccgcgttcacgccattttcctgcctcagcctcctgagtagctgggactgcaagtgcctgccaccacgcctggctaattttttgtattttttagtagagacgaggtttcaccgtgttagccaggatggtctcgagctcctgaccttgtgtccgcccacctcggcctcccaaagtgctgggattacaggtgtgagccaccatgcccggcctcctttttatttaaatgtcaaaagttaatgaagtcattattagtgaaaatattttattagagacaaaaatacttaatgccagtggtcaagacttttcaacattaaggaatttcctaaacaagtctttttatttacttatttttttgagacagggtcttgctctattgcccagattagactgcagtggaacaatcacgccttactgcagcattaacctgctgggctcaagcaatcctctgtcctcagcttcccgaatagctgggactacaggtgtgtgccactatgcttagctaatttttaaagtttttgtagagatgggatcttgctgtgttgcccagggtggactcaaactcctgagctcaagtgatcctccttcctcagcctcccaaagtgctgggattacgtgcaggagccaccacgtctggtctgcatttaaatttttggcatggggctgggtgcagtggctcacacctgtaatttcagcactttgggaggccgaggtgggcagatcacctgaggctgggagtttaagaccagcctgaccaacatggagaaagcctgtctctattaaaaatacaaaattagccgggcatggtggtgcatgcctgtaatcccagctactcaggaggctgaagcagaattgcttgaacccagggggtggaggttgcggtgagctgagattgcaccagtgcacgtcagcccaggcaaaaagagcaaaactccatctcaaaaacaaacaaacaaaaaattggcataaaaatacactgtaggccaggtgctgtggctcatgcctgtaatctcagcaccttgggagactgaggtgggaggattacttgagcccaggagtttgaggcctaggcaacatagtgagacaccatccttatttatacatttaaaaataatataatttaaaaaatagaaaaaagaaaaaaccttactaagagcgcagatctcatgttaagtgttctttcttttagtttttttttgttttgtttttgagacagtcttgctctgttgcctaggctgcagtgcagtggtgcgatctccactcactccaacctccacctcctgggttcaagcaattatctcacctcagcctcctgagtagctgggattataggcacacatcaccataccgggataatttttgaatttttggtagagatggggtttcaccatgttggccaggctggtttcaaactcctgacctcaagtgatctgcccacctcggcctcccaaagtgctgggattacaggcgtgagtcgtcatgcctggtgagtgttcttaccataataaaaaaatttttaaaagaaaatgaccaacaacctaatagaaaaatgggttaagaacatggagattacaaaacaaaactatctctaacacataaaaagatgctctttctcattaaaaaagcaatttaaaattaataatagcaaacaatgataattctatgtgctaggtactgttcaaagctctttgcatgtactaactcatttaatcctcacaaaaaacataaggcagaaactattattaacttcattttagagatgagaaaacataaatgaggaagttaagcaatttctctagcatttcacaagaagtagcagagtaggaatttaaacccaagaaatctatccccacagtctgtactatttaatctctcaaactataatgggaaataaccatttttcatccactgaatcagcatcctactaggcaaggctttgggaaaacaggcactttaactggtgggaattcaaactgatattacaggggctgggcatggtggctcacgcctgtaatctcagcactttgggaggcctaggtaggtggatcacttgaggcaagcagttcaagaacagactgggcaagatggcaaaatcccatctctagtaaaaatacaaaaattagccaggtgtggttaatgcatgcctgtaatcccagctactcgtgaggctgatgcatgagaactgcttgaacctgggaggcagagggtgcagtgagctaagatcatgccactgcactccagtctgggcaagagagtgagactgtctcaaaaaaaaaaaaaaaaaaaaaaaaggcattacagatagttatttaggttttttttttttttttcttgaaatacacgtctgggtgcttataatcctagccctttgggagggtgagttgggcagatcactagggcccaggagttggagaccagcctgggcaacatggcaaaacctcatctctacaaaatatacaaaaattagctgggtgtggtggtgagcacctgtagtaccagctacttggcaggctgaggtgagaggatcacttggacccaggaggttatggctgcagtgagccatgattgtgccactgtactccagccagggtgacagaacaaatctcaaaaataataataataaataaaataaaaatacacccatgctttaaagccagggatctgtgcattactgaaaagtagctgtaatgataatggtggtaacaatttgtatgttcataaacactgcactggtaaaatatattatcatatgtaaggaacaatggaatacatatagccataaaaaaagataatctctatatgtgcagatagaaatgatctccaaaatcagttaaggtacagaaataaataaataaatatctacttttttttttttttttttgagatggagtttcgcttttgttgcctaggctggagtacaatggcgcgatctcggctcatggcaacctcggctggcggcaacctgcgcctcccgggttcaagtgattcttcttctcctgccacagcctctcaagtagctgggattacagacacgcaccaccatgcccggcttattttgtatttttagtagagacggggtttctccacgttggtcaggctggtcttgaagaactcccaacttcaggtgatgcacctgccttggccttcaaaagtgctaagattacaggcgtgagccaccacgccggctaccatcttagtttttaaaataatgtaaaagtttatactaaaatatattttctggccgggcacagtggctcatgcctgtaatcccagcacttagggaggctgaggcaggcagatcacctgaggccaggagtttgaaaccagcccggccaacgtgatgaaaccctgtctctactaaaagtaaaaaaatgagccgggcatggtggcgtgcacccatactcccagctgttcgggaggctaagccaggagaattgtgtgaacccaggaggcggaggttacggtgagccaagacggcgccagtgcactccagcctgggcgacaaagcgagactctgtctccaaaaaaaaccaaataaataaaataaaataaaataaaatatattttcattgacctgcatttttcacagaatattagttttgtaatgagatttaaattatttagccattaaaagagggagaaaaggaaaatataggcaaatctactactttcatatgtaatacattccaaatccatacacaaaagtcaaagatttcaagacgtatcattccaaatatatctgaaaaactccaattacggcccacctttcagagacaatcttcaacaaataattcaaatatttggaatggcattttcatcacagctgacaataaatctgcatacctattatgagaattcatttgctactctggtcacaaccagcaaatttcttcttagttgtaattctttttaaatgaagaccttagggggccttttatcactagtataaccctcatttcccactccacctccctttttcatttaattttgtaaaataaataacaaaagtattttttttgcctttaaaaaaaaaatctaagcagtatgtccctttcttcatgtaaaatcttgagggaaagccccctatgtgtaagaacagacctaagagaagccactccttttgaagtggagttggagagttgagtaagctgaatgttggaaatggtgggaaaaaaagctaggattggaccacagtggccttaagaatatatcacaaatatatttaaagaaaactaatgtgcttattctagttgggcacagaaatctgaggactgatataaaattagtcattatatatcactataaattacttaccataagagcctcggccagccattttatgaaattgttgccaagtgagaggaccctgaacaccccaaggtcttactgttctttttttctgaatggcatcctgaagaactggctgaagagagaggagcattcgaagtatatcctgtgagcactgcatactcacatctacaagcattttaaaaaaaacaagtaattaagaattgctattgccaacacaaataaaattttaagataatacaaaacacatatagggaagttcaggtcttcagcatcaagaagattaaacccttacttgtgcagagaattgcattaagttctacaagatgatctgtaaaaaggttcttctagattcttacaaccaagaagacacacaataaaaagttactgtaacttatttccataaaaagtcattcattagctgattaatcaatttataaattaatcaaataaatttctttctttttgcatttatgttggctgttttggtgctgtaggtattttaccagaaagaagtctgcctcacattgaaattatatcccatcattagcactactatggtaaagtgaataaagactggtcataattattaaagtttaatttgaaaaaaaaagtagactttaacaattctaaaatacagaaattatacagtaacttgctcacactgctaaaaagtatattatccataaatattttataagcttatacatcttaaatatttataaattatcaaattatgacctgcatttctgaccaactatcagaatgggtatgaaaggtgctcctcataaatgtcaaatggctaaaggaaaaatcactaaaagatattgatataataaatgtggcccccagaatggtccagttgtaccactaaacctgtttgagcacagttatattaaattattcaattttaattcgttattacctttgcctagtttatcgttattggccccaatttcctatacctaaaaagtgtagtggctgggcccagtggctcacacctgtaattccagcactttgggaggccaaggcgggtggactgtttgaggtcaggagtttgagaccagcctggccaacacagtgaaaccctgtctctaccaaaaaatataaaacttagccaggcatggtggcacatgcctgtaatcccagctactcgggaggctaaggcaggagaatcgcttaaacccagaaggcaggggttgcagtgagccgagatcatggcattgcactccagcttgggtgacaaagtgagagcctgttgtctcaaaaaacaaaaacaaaaacaaaaaaaagtgtacggaactagataaaactaagttccaaatacaatacttaatatgtaatatgcttaaataaacttttgtatacatagtagaatactacttagtagttgaaaatgctaacgggccgggcttgggtggtggctcatgcctgtaattgcagcactttgggagactgaggcagtcagactgctcgagcttaggaggtcacaggcagcctgcgcaacatggcaaaaccctgtctctacaaaaagttagctgggtatggtgccacacgcctgtggtcccagctactcaggagactgaagtgggaggatcacttgaacccatgaggtcaaggttacagtgagccatgatagcgtaacactgcacttcagcctggacaacagagcgagaccctttctcaaaaataaataaataaagatgatcacaaaaaaatacctatcaagtactatgcttattacctgcatgacaaaataatctgtatgctgacccccaggacacaagtttaccttttacttaatataacaaacctggcacatgtacccataacctaaaagttaaaaaaaaaggagtgatcatggaggataatcaatcaatagaaataaactgaaaatccagaaatcaaacctcatgcttatgataaattgatttttgacaaaggtaccaagacaacttaaagataacatttttccatagatgattctgggacaactagatatccacatgcaaaagaatgaagtcagaacccttccatatactatacacaaaaaattcagaatggatcagagatctaaatataagagctaaaactacaaagttatttcaaaaaagtaataggagtaaattttcaagaccttgggttaggtcctgacctagacatcaaaagcacaagcaacaagagaaaaaataaattggacttcatcaaaattaaaaatgtttgtgcttcaaagaataccatcaagaaagtaaaaagatttcacatcctatggagatatgaaaaacaggaaagtgaaaagaagctgagtgtgatagtaggcccctgcagtcctagctacttggggaggctgcagcgggaggatcccttgaatccaagagtttgagaccagcctgggcaaagtagcaagaccccgtatcttaaaaaaaaaaaaaatgaaaagacaatccagagtacaggagaaaatatatgcaaatcacacatgtgataagggggcttatatccttgtatccaagatatataaagaactcaggattcaacaatacataaaaacctaattttaaaaacgggcaaaaaatctgaaaagtcatttctccaaagaagatatacaaatggacaacaagcacatgaaacaatcttcaacattattagtcattagggaaatgcagatgaaaccacaatgagatactacttcacacaaagtatcacaatgagatactttgattataagatgactataataagaaaaacaatgtgacaagtgtaagtgaaaccctcatatattgctggtagttatgtaaaatggtgcagctgctatggaaaacaatctggcggttcctcaaaagattaaaccagtcaggtgtggtggtgcatgcttgtaatcccagctatcagggaggctgaggcacaagaatcacttgaacctgggagttggtggttgcaatgagccaagatcgtaccccactgcactccagcctggatgacagagtgagactctgtctcaaaacaaaacaaaggccaagcgcaatggctcatgcctgtaatcccagcactttgggaggccgaggcaggcaggtcacctgaggtcaggagtttgagaccagcctggccaacatggtgaaaccccatttctactaaaaatacaaaaattagctgggtatggtggcaggagcctgtaatcccagttacttgggaggctgaggcgggagaattgcttgaacctgggaggtggaggttgcagtgagccaagattgcgccactgcaccccagcctgggcaacaagagcgagactccgtctcaaaaaaaaaataaataaataaagattaaacagaatatgactcagtgaatccacttaagagtaataaaaacatgtccatataaaaacttgtacacaaatgttcatgggagctttattcataatagccaaaaagtggaaaaaatctaaatatccatcaactaatgaatggataaataaaatacggtatcttcatacaatggaatattatttggcaataaagtactaatatgtgctatagcatagatgaaccttgaaaacattatggaaagcgaaaaaagccagtcactgaagaccatacagtatataattcgattgatatgcaatatccaaaagcggcaaatctagagagacagaaaatagacttagtggttgtctatagctaggaaagaaggttggacggaaaaagggagtgactgctaacgggtagggggtttaatatgaaaatgttttaaaacccactgtgttgatgactgtccaactctgcatactaaaaagcagccaactgtacattttaaatgggtgaattgtatggtattcttaatttttgttcagcaagtatgtattttttataattagaacagagctttgtctatcttcaacaaaattaatgttgtcattaaaatatacaaactatactggctgggtgcggtggctcacacttgtaatcccagcactttgggaggccgaggcaggtggatcacgaggtcaggagatcgagaccattctggctaacacgttgaaacccgtctctactaaaaatacaaaaaattagctgggcatgtggcgggcacctgtagtcccagctactggagaggctgaggcaggagaatggcgtgatcccggtaggcggagcttgcagtgagccgagatcgcgccactgcactccagcctgggcaacagagtgagactccgtctcaaaaacaaagaaacaaaaaaaacagaaaaaatacatatatatacaaactatactttgtagacttttaaattcattcaaacataaccttctttcaagatgttaaaactaaataaacaaatccaaacatctattttaatatcctgatcatctactgtgttcattattctaggtgtttagattatagacaaaaatctttgcctttacacagaactttgcaaagagtgtacttaatgggggtaagaaacaacaattaataaattttattatgttagaaggtaatagtccacactatggaaaaaaagcaagatggagaacaagaagaagggtttgcatttttataatgagaagatgatatctgacaagatttaaaggagacagagttatccacataaatatctggaaaacgagtatccaagagggaggaaacatgccaagggctctaatgcaggagcttgccaccatttcatgatgctgctataatttaatcaaagtattctaatattgcacatttatgttttccaacattattatttttcttgagacggagtctctctctgtcgcccaggctggagtgcggtggcaccatctctgctcactgtaagctccccctcccgggttcacaccattctcctgcctcagcctcccgagtagctgggactacaggtgcccgccaccacgcctggctaattttttgtagttttagtagagacggggttttaccgtgttagccaggatgttcttgatctgaccttgtgatccacttgcctcggcctcccaaagtgctgggattacaggcatgagccaccgtgcccggcccattatttgtttttaatactgaaaatttttaattgaaatataaaggcttttctttcttctctcaaactcctggtctcaagcaatactcccgcctcagcctcccaaaatgctgggattacagaggtgagccatggtgcccagccccatttctctctttcttgtactaaattattttctttggacaagttgttaagaaattcattttcaagtctgcagctttctgtttacatcagtgcttactgttattcaaaaaacatataccaggtaaagctcaatattttccattatttggcaaataagttggttcttaaaaacaaaataattataaagagtgccactaatcctcctgctgctgtcattaccactactaacatctgagttcttactatgtgccaaaaactgcctttttttttttttcttcagaccgagtttcactcttgttgccgggctggagcgaaatggcaggatctcaggctcattgcaacctccaaaactgctttttattttttttattttttttcagaccgagtttcactcttgtcgcctgggctggagtacaatggcaggatctcgggctcactgcaatatccacctcatggggtcaagcaattctcctgccttagcctcccgagtagctgggattataggcatgcgccaccatgcccagctaatttttgtatttttagtagagatggggtttcactaggttggtcaggctggtctcaaactcctgggtggctcatgcctggaatcccagcactttgtggggggccaaggtgggcggatcaactgctctgtatttcatttgattctctcaataccctgtaaagtaaatctattattgaccctattttaagaaatcaaggcacagaaaggttaactaacttggcccaaggtagcaggtagtatatagtgctagagtcatggtagtatatagtgctagagtcatgtttcaaacccaggcagtctgagtccacagcctatgatcttaactactctatatggcttaaaataatctttccttttttttgaatacctatgatatttatttgtgtctttccctttttaaatttggtccctgagaatgaataattggataaatgctgatactgtcatatacatgaacttaatcactggtccatgtgttgtcctcttacatttcaaaaattttctttaataataaaatgaacaactgtaatctcactgcccaagaactagaacattaccaaaaacgatcttattaaatgtttctccctatccctatctcttggtcatttttggacacatgtgaaatttcaagaattaaccaatattctcaattttatgtgcatgtaaataatacatttagttgtgcttgtttcaaaactttattaacggtaatacattaaagaggtatttttaaagggtatctgactatatgtaatcttctgggacttgttccctcttcctctcctcaatagtatcactaagattcatctatttgttatacataactgtaattcattttcagaagccatataacattccatctgtactatcatgattactcaaccctgcaaacatggccatttttttctttttgagaaaaatctcactctgtcaaataggctggagtgcagtggtacaatcatggttcaccgaatcctccacctcctaggttcaagctatactcccacctcagcctcccaagtagctgagactacaggtgcatgctaccacacccagctaatttttgtatttttagtagagatgggttttgccatgttcaccaggctggtcttgaactcctgggctcaaatgatctgcctgcctcagcctcccaaatgctgggattacagccataagccatatctgtcaattaaaaaaaattcctttctataggatcactcccaatgcacctttaataaaataataataaacctctcttttaaccctattatgcaatttctctgctatttacagcaaaagtccccagaaaattgtctaagtttgcttctcatcccgttcttttgtgaacccactccaatcagattgactgaaactgcctatcaaggtgaccaccaacttctatttggtcacatccaatagcctgtctcagttttcaccttaatgtatcgaagtatttgatagagatgatcactctcttctaaatattcccgggccaggcacggtggctcacacctgtaatcccagcactttgggaggccgaggcaggtggattgcctgagctcaggagttcgagaccagcctgggcaacacagtgaaacctcgtctctactaaaatacaaaaaattagccgggtgtggtggcgtgcacctgtagtcccagccacttgggaggctgaggcaggagaattgcttgaacccgggaggtggaggttgcagtgggccgagatcacgccactgcactccagcctggtgacagagcgagactctgtctcaaaacaaaaacaaacaaacaaaaattccctatacctgatttctaggataccatgctcccttggttttcctccaacctccttctcaatttcctttcctggtgccttttctccctccccacttataaatgtcagctccatccttgtactactctatctacaattactctacagtttatttcatccagatccacagcttttcataataactcacacacaaaatttttctatctccagacccaatcattcctctgaatttaaaacatattatctccaaatgtgtatctgatttactcccccgtgtttccctcctctgtagttagtactaccattcacccaggtgctcaagctattattgatgcctcatctttccttacacgtcttttggcaaaccctgtaggttctatttcccaaataacctaaaacctattacttacatctcgctggcctcttatcttgtctaagctaccatcatctttcacctaagctactgaaactgccttccaactgatttatcctgcttctgttctcactttcactacttccaaaccccaacgctattttccacacaatagcaacagagtgtcttgctctgttgcccaggctggagtgcagtggcattatctcagctcaacacaacctccgccccccaggttcaagcaactcctctgccttggcctcctgagcagctgggaccacaggcacgccccaccatgctggctaatttttgtatttttcaccatattgggcaggctggtctcaaactcctggcctcatgatctgcccacctcagtctcccaaagtgctgggattagacgcatgagccaccgcacccagccattttttttttcttttagatgggagtttcactcctgttgcccaggctggagtgcagtagtgcgatcttggctcactgcaacttccgcctcccaggttcaagtaattatcctgccttagcctcccgagtagctgggattataggcgcccaccaccaagcccagctaattttaaatttttagtaaagacgggatttcactatgttggtcaggcaggtctcgaactcctgacctcaggtgacctgcctacctcagcctcccaaagtgctgggattacaggcatgagccactgtgccagactgagagatctcttaaaaaacaatcagaataaggatcatgttactttccttgtcaaaactgttcaatagcttcccatcacatttagtataaaccacaaaggccttacatggtctataagactctaaatgatgctggtgaatggctacctcctaaatttcatctccttccagtctccctatcacacaaagcattccagcagcatcagtcaccttaatgttcctcaaacatgtaaaagcaaaatactccctcagggtctttgcactgcctgaaacactcttccctcatttaactacatagctcatattctatgttatgtaggagttttcccatatgctatctcctcagtagtatcttatctgaccatacatctaaaatagtacatatgtggtgtcttgttctgttttactctgcttttcctccaaattacttcttactatctattatatgcttttttgtttatttcctattttctccactaaattatagattcaaaaagggcaaagaatatgtgtgctttgttcaacagtgaatctaggctaatacctggcacatacaaggtgcccagtaaatacttaatgagtgaaagaatgttgaataaagcagaccactagcaatgttatgctaataaatatatggaatgtgcctttcatattcctacataagtatataattacagatttataataaccatacttttattggtgaaattaaactaaactgctaagaaattctccctttaaaaacatcatccataaagagttttaagtccaactttaaatgtatttgccacatgggaaactgcctttattactttttcctaagaatgtaactaaagggaaataagcaaacaaaaaagtattttattggcatactttaccgtttcttttggaccaggggtgtaagcatgaacttttcacaagtgcttcatcaacttttcctcctgacatgttatccatgaactgacgcccatgttctaatgcaaggtagcagtcattgcaacagtcacgctcttcaacacgtacccaattgctaattacaccacttttaggaaaaggatcttggtctgctgctccaaagggtgaaaataaattagtgcactgatcttgtagcaataatatcaaatcatcagataatttttcagattcctttagtcctccattaacatgttcagcagaggtagccctgagagcttcaaaacgtttttctgcttctttgccacagtctgtattgcgtcctatgatatctagttcatcttcaagaaataatcctgaattgtttccaaattttctgttcatgacagcactgaagccacaggtacacctatattgtgcttcctgcgttggatctggaatgtaaactccaacatcggcacccttgatgttcatgttgcaaacacagatgcaacaactatcaaagttacagtctttaaacaaattcataactgattctgaaaggatgaggtttacataaagactgtgtgcttcagggatggaagggacagttgcaggttcaacagaattaaggggtctgcatgtagatggggtagaagctggtgaatacaagtctgaattttcatatttgactgaaccttgagcactagcaggtccaccagctccacgaggagtccgaggagtccttggagtccttggagttggaaaccgaggggtggatggagaaggaagaattcctgctccgctgttactaggaggtgcactgctaggaggcatcccaaaagaagtatgagtttgaggtgtataagcagtgccatattcttgatccatattacttccatcactatcatcaccagggtaaaagaagatcaaatatatatataaaggaacatattagtaatgtgaaatacaactaaaaacgtcccaaatgtttttcaattacatagaaaattatgaaaggacaagtattgcaagaattacaagcacagtcaattcttatttctggttaacatatctactctaagtgattgttgttgactaaggatcaattaacaagttcaaaaatcattaataagcactctatacactaatgcatacctagacatccatatttactatctataaattttgtttactagaaatacttatatttccttgattctaagatgctactgactataaaaaaagaaaaatgattttagagatgctcatgtgtaaaaagggaaaaatggtaattttaaaatgctaccacttataagacatctcagattcagatttcttttagccttgagttgaaactgaccaagtcagagatgttaaaatgtgaaaagtgtggaaaagatggcaaatgtaaaaatgggagcaatttaaaattgcagcccaaaagaaaaggtgcttcggaatacaaatcaagcataatagtcttaagtttcctaatagtttatccatacccaattaacctttttttttttttttttgagacaaagtctcactcttgcccaggctggagtgcactggtgcgatctcggctccctgcaatgcctgactcccaggttcaagccattcttgtgcctcagcctcccaagtagctgggactacaagcatgcgccaccacgcttggctaatttttgtatttttagtagagacgaggtttcgtatgttggccaggctgatctcaaactcctgacctcaagggatacgcctgccttggcctcccaaagtatgggaattacaggcgtgattcactgctcccagccaatcactataattgattaaccagaaataatttttagaattttcaaaaaccaattttatttttccagcataccaggtaaatctatgaaaaaaaaattaaagctgtataagcagtcacatactattgtaacaacataaatcatacccctctttgatgaatggcattgaaggccctgaagaaagcaattccaattttccaacagtccaactctgacggtaaatacactcttctggcaatttgatagggggcagatattggcttggtagagtttttagaggtgcaaacatggaacatcccactagaatttgacaattttcaggcttatagacataagaaaaatcctacaatataaagatggtaggttttcagtatcttatcttctaggaggaaaaaataaataaacaaacaggctctggaccttttttcctttctttaaacagaataaaatctaaatacaattctattattttcttaaatgcattcttaatagtgacaacaataattcagtcctcaacttagctacaaaaccgcaaccactataaaataatttttgactatagcaacaaattaattctataagaaaatataggaagtgaattatttttctagaaaaaacatacttactttaatttcagaaggtttggggctacagaatccctcatcaacctcaattttgaactgcgctcctatactagaactatttccttctagaacagttcctccaggtgttgtatccatactaccatattctttattattcatattcattggggaaaatcccataatatgttgttccaatgatggtggtgtaggatacattttatgaagatctgcagtgcctatatttaataaaaacatacattttaacatgactaaaaataggcgaatctgtgtttaaaccaaaaggagtggggagctttgttgagattaaaagttcgcaaatttatctcgagcacagatgagggaagcttacttatgcaagataacgggtccagatttcctgtctttgattccttgcagctggctttatcatctgatccatttgctgattttttagatccaggctatttaaaaaaagcacatatttatctaaaattttacatccaatgtgatctcaaaatagtaatcattcagatataacttaacagtaaagcccattcattaaaagtagtattttgaatctgtgatacagccaaatacatactagtgttgaaagatataaaatatttcttaatcactgactccagattaatttatttggtaagcctccaaattaaaaggaaaaagttcctccaaagaaaatgaccaatactttcaaaatacacagaagtaaggttaaccttaacttaaaacccagtaataagaggccggacatggtagctcacacctgtaatcccagcactttgggaggctgaggcaggcagatcaatttgaggccaggagtttgagaccagcctggccaacatggtgaaacctcatctctactaaaaatacaaaaaattagctgggtggggcatgcctgtaattccagctactcgggaggctgaggcacaagaattgcttgagcctgggaggcagaggttgcagtgagccaggactgcaccactgcactccagcatgggcaatacaatgagactcttgtcttaaaataaataaaaataagaaaacctgcaataagaaggggttgtaattaacattagaaatgcttcttggtaaaagatacttgcagagaaagcatttgtctccttaagttgaacacattaaagtttcctatataatcaatcactcacctatctaaattcttatttatactttcaccttgttttaatagtctccctattcctgcaaaaatactgttaacaggtaaaactaagtacaaacttcagaagatctaatgacaaagcaatagagttcctaacttttagtagattgaacaaacaagttttactatctccaagctcttaccagtgttttcagagctaacatttgttccatgtcttctgttagacagtctgtgataaatattaatatgtagaccacgttctgactacaatcttttatttcagaggaaccacagctgatacaggaatggtagtagagagaaagtatgaatgtgccaaagcattcaaggatatagttgcctagtaaagggtgccctaaaatgtactacattatgggatacacagtaaaagtttatgtatctgcaatatatatatatgtatatgtacacacacacatatacacacatatagagatatatatgttgagagaggactaaatgcatattatataggaaaggaaagatcaaatgtaccatagaagtttccaagctacctttatgcagatgaaaaggaattcccttttatgataatgcagcacccaattcattaatttgacagagacttgacattctagggaatctcattttaagctttaatttcttttatcttcacctttctctgcaaatgggtgttaaagattaaatattatttttttcctcttttattgttatatcatgtatctgtcttataatagctgtgatgcaaaacaaattcaaaagagctggtattccttaataaattgacaaagcaaataactttaatgtcaattatgtatgtgttctctgaatgagtaaattccagagtcatttctcaaactacagaatcaaataggaaaataattctgcttcctaaaactacaaaacagaacatacggcagagctcaaattaaggttaatcatgtgtcccccaaatgtaaaaacaaaaggagaaacaaaaccctcaaagtttatagatgacactatggcaagactactcaaacatgagatttaaaaaagaaatcaatgaatgaggttttactatatttcctattgttcagggctaaaacatagtattaaactcacaaatcacttctaaaaaataaaaaaataataaaatcaaggaaaacaaattataatcctattcattaatgagatactcactgttagttcatcttcatcagaattgaagagattatcaaggtcagtataagagacagccaggtctgagtcataaatcaaacttgttgatggaggacgggcatgactagtagggcgtggagcatctacaaaagtcaatcagaaaaataaaattaaaactgctactactatgcctgtaatcccagcactttgggaggccgaggagggtggatcacgaggtcaggagttcaggaccagcctggccaagatggtgaaaccccgtctctactaaaactacaaaaatcagctgagtgtggtggcaggcgcatgtaatcccagctacttgggaggatgagacggagaactgcttgaacccaggaggcagaggttgcagtgagccgagatagcaccattgcactccagcctgggagacagagcgagactccatcttaaaaacaaaaacaaaaaacaaaaaaaaacctgctactaatgaccacataagtactattctttttaaattagacatataactttaaggtcataaggggattatgcaacaagaaattgtactttattgtttaaaatcgagaaagtgtttttatagaaaaaaaagttataaataaatgattatatctttcccaggaagctcactataaggtcaggtaatccataaaatagctaagtactctacatgaataattaatgcatcaaataaaaatataaatactattagaaaaacaattaaatacacatacacatacttgtaatttttttttcttttttttgagacggggtctcgctctgtcaccaccaggctgaaatgcagtggtgcaatcacacctcactgtagccttgacctctcgggttcaagcaatcctcccaccccagtagctgggactacaggcacgtgaccctatgcccagttaatttttttttttttcctcgagttggggttttgccatattgcccagactggtcttgagcttctgggctcaagcaatctgcccacctctgtttctgaagtgctgggattacaggtgtgagccacctcacctggcctgtatttttctatctttctgaaatgtaaacgaagaacagaacaatgatcaagagctgactcttgggccagacagactttaatctgaatcccagctccaccactaacagtatgaccctcgacaaattacttaatgtctctgtgcctcaataccaagaataaaatgtaatagaatgttggtaatgtgcttcgcccagtactaggtgcttaagtactagataaatattaccgcttagttaccgtactacaattttattttcctaccctctcgccctgttttagggtaacaaaaacatgataccaattacaatgaaaattaaactcccaatatattcctgcacaagaaaaacaatttgatacataaccttccaaatcattctctgttaactgacttgagagtcctcgttttcagaaagataaaagtcacttccccagtgtctctggtgtgtcagttctaaagattcactagagttgtgcctttgaaattttaaaagtaaaaatcatctaagatacttactaaaaaccaagattttgaagctccaccttggagatactccagaatgtagcatatgtctcacattttgagaaagctgaactacaggcacaagaaggggcttacatgtttcctatatcccagggaacatcctagcataggtaagtagcccaaacaacccaatttgtttccgagttttttcgtttttttttttaatgtatgtattgtgaaatgactaaatcaagctactgaacatattcattacctcatatacaggtacttttttttatgttgggaacacttaaaatctactctgaattttcaaatatacaatctattattaattgtagtaaccacaatttacaatagatctcttgaacttattcctcccaactgaaattttgtgtcccctggccatccccattcccctacccccagtctctggtaatcaccactttactttctacttccatgaatccagctttttttttttttttgagacagagtctcgctctgtcgcccaggctggagtgcagtggcgtgatctcggctcactgcaacctctgtctcccggattcaagcgattctcctgcctcagctcccaagtagctgggactacaggtgtgtgccaccacacccggctgattttttgtattattagtagagacggggtttcactgtgttagccaggatggtctcaatctcctgacctcatgatccacctgccttggcctcccaaagtgttgggattacaggcgtgagccaccacgcccagccatatattttaatttttaaaatatttaacatttgattgattgattgattggagatggagtttcactcttgtcacccaggctggagtgcaatggagcgatcctggctcactgcaacctccgactcctagattcaagcaattctgcctcagcctcccaaatagatgggattacaggtgcacgccaccacacctggctaattttgtatttttagtagaaacggagttttgccatgttgaccaggctggtctcaaactcctgacctcaggtgatctgcccaccttggcctcccaaagtgctcggattacaggcatgagccactgcacctggcctatttattgtttttacacagatagggtctcactacgttggccaaggtggtcttgaactcctggcctcaagcaattctcctactgtggcctcccaaaatactgagattataggcatgggccatgacacttggccttgcagcagactttcaaatcaggtagtgtgatgccaccaactttgttctttttgctcaagactgctttagccattcagggccttttgtgaccctatacacattttaggattgttttttctattactgtgaaaagtgtcattggaattttgatagggattgctctgaatctgtagatcactccggcaaagaatccaaactgttgaattttcaagctacctagaccatttgttcattgttcagatagatttttttcttatttttggttatccacagactgaccctctatttattccaaatattaaaactttgtcatcgaaaacacacaccagaagatgacttactttgcccacatcaaaagttaaatggattttgctgtacatcatagtgaataataacatattgtatacttgcaaattgctgaaagtagattttaagtattctcacccacacgcacaaaaaaggtatgtaaggtaatgcatatgttaaacagcttgatctacccattccactatatatacatacacacacatatacacacacacatatatatacacactcacacatatatatgtaaaataattccaagtgtttgctcactgaagacttgacagtactttcaagcttatagttgtggggttacaataggagactaacaattctcctcataccagtctccattgtttaaattataactgaaaaatgatttagaataagataaactgtaactgtgttgtgacacagaatatgagtaaaatgttaaaaaaatgtaaatatatatatattttttagtatgtgtgtatatatgtatagggtctcactatatatatatatacacacacacacttggcgcactgtgtatatatatatatatatatatatacacactcccccccaaaacatcatgttgtataccataaatatatataatttttacttgtcaattaaaaaaattattttacaagttaaatgggttttgtaaatgaattactatactatgtctctctattccattcacaaggagtttaagtcagacatattcaaagtggagtcttgaccactgtgtccccaatacccaaacagtacctacacataacaggtgctaactaagtatttgttgaattagtggcctcagaacagctctcttaacttgtgtgtgtgggaagaaaatgacagcaaaattccagtaaagtttaatttagaaattgtggttttagatctgaaggaccttaggcaatgaccttatctcctcattttacaggtgaaaactttaaaacattttactcctatttattctatgtcacaacacaatcatagttgagcttattctaaatcatttttcaatttttatttatttatttattttttgagacagagtctcgctctgtcacccaggctgcagtgcagtggcacaatctcggctcactgcaatctctgcctcttgggttcaagcgattctcctgcctcagcctcccaagtagctgggattacaggcacctggcaccacacatgctttatttttgtatttttagtagagacagggtttcaccttgttggccaggctggtcttcacctcctgacctcaggtgatccacctgcctcggccttacaggtgtaagccattgtgcccagcccaacttggctcaccacaacctctgcctcctgggttcatgcgattctgctgcctcagcctcccaagttgctgggactacatgcatgcaccaccacgcccagctaatttttgtttgtttgtttgtttgagacagagtctcgctctgtcgccaggctggagtacagtgacatgatctcggcacactgcaacctctgcctcccaggttcaagcattctcctgcctcagcctcccgagtagctggaaccataggcgcgtgcctccatgcccagctaatttttctatttttttagtagagacggggtttcaccatgttggccaggatggtctcaatctcttgacctcgtgatccgcccgccacggcctcccaaagtgctgagattacaggtgtgagccactgtgcccggcctaatttttgtatttttttagtagggatggtgtttcaccatgttggacaggctggtcttgaactcctgacctcaagtgatccacccaccttggcctcccaaagtgctgggattacgggcgtgagccacggtgcccagatccatttttcaattataatttaaacaatggagacaggtatgaagagaactgatagtcttcgaattgtaacccccattgctataggcttgaaagtagtgtcttcagagagcaaacacttggagttatgatgatgaaacactctactgtcaaccaactggacatcagtatctttctcccatttttttcaagtgtgtttttcctggagagtataaccatagccttggcatagtataacaatggccttttctcaatcactttccagtcaatatgtgccttcattcttttacttcctttcacgtaattcccagtagaagggggtgagaaatctattacataaaactgagtttttaatagaaaactatttttatatgtaaaaacaggaaagaggctgcaacaattaaaaacacaaattctatcacctgaacttgcttcttccaataaaagataaccaataaacccatcatttaagaaagattcctttctatgaaacataatgaattatacaaaaaggaacattagaagtccaacaatatcagatcagtctgtagtaacaatcctggaatgcaatattttcattaggaaataaagattttaccttgcttgatagagggactaaataatgacatagcatcttcttcatgtgataacactgttacactagatgtcccatcttctacctgcaaacaaatatttcatgttaggctgaaatatataatttaccaacaataaaatctaccaattattgaggagctgtgtgtcaggcatccagctaagtgtttaacatacattatcactgattcttacagtaacaagtaagtagtatgcttattattacttttttttgagatggactctcgctctatcaccaggctgtagtacagtggcacgatctcggctcacttgcacctctgcctcctaggtcaagtgatctcctgcctcagcttcccaagtagctaggactacagacacatgccaccacgcccagctaatttttgtatttttagtagagatgtggtttcaccacattggccaggatggtctcaatctcttgaccttgtgatccgcccacctcagcctcccaaagtgctgggattataagtatgagccaccacgcctggcctgtggtatgtttatcttatagacaaaagtagagactctaatgtgccccagaaaatatggctgataaacagtgagagctgaaattttatcctaaatctgtcaaattccaaagtccatgttctttctttctttctttctttttttttttttttttttgagacagagtctcactctgtcacccacgctagagtgcagtggcatgatcttggctcactgcaacctccccctcctgggttcaagagattctcccgcctcagcctcccaagcagctgagattacaggcatgcaccaccacacctggctaatttttgtatttttagcagagatggggtttcgccatgttggccaggctgatctcgctctcctgatctcaggtgatctgcccgcctcagcctcccaaagtgctgggattacaggcgtgagacacagcacccagccggttcacgttctttctattatacctgcagccttcccaactaccactactctcatacttccaaaaagacaaaatttcaagtacctggcatatagtagggctaagtaaaactttgtgaaactaattttgtattaaacatattattgggggccaggcacggtggctcacgcctgtaatcccagcactttgggaggccgaggcgggcggatcacttgaggtcagcagttcaagaccagcctgaccaacatggagaaatctcgtctctactgaaaatacacaaaattagccgagcgtagtggcgcatgcctgtaatctcagctactagggaggctgaggcaggagaatcacttgaatcagggaggcgaaggttgcagtgacctaagatcataactttgcactccagcctgggcaacaagagcgaaactccgtctcaaaacaaacaaacaaacaaaaaaaaaaactcacacgtattattggatccttttcataactttacagatttcaattttttttttttttaaacggagtattgctctgtcaccaggcagaagttcactggcatgatctcagctcactgcaacttctgcctcctgggttcaagcgattctcctgtgtcagcctcctgagtagctgggactacaggcgcccgccatcgcacccagctaatttttgtgattttagtagagatggggtttcaccatcttggccaggctgctctcgaactccagacctagtgatccacccacctcagcctcccaaagtgctgggattacaagcgtgggccactgtgtctagcctattttcatattttgtatataagacataattcctgtgtagcaaagttatcttaatcttaacaaattctcatatatttgatttttaaattttattctaataactatatatcttgcacttcatttttacttctaggtgcactgtaagttcctgaatcacatattcaaaaatagcacatattttttaaactcagtgatgtatattttattgtatctttgaaaactggtaattcacttacaacatattttaaaatcactgtcaaaatagcctacctaaatgtcctgatttcaattatgacaagtttaatatgccctttatccaacccagaaacttttaaacaacaaaatattttcattatcagaggtcagctataattggtaccatgtgcttgatttacccattcaaaaaaatacatttttctttttttctttttgagacggagtctcgctctgtcacccaagctggagtgcagtagcctgatcttggctcactgcaacctctgcctcctgggttcaagggattctcctgcctcagcctcccgaatagctgggattacaaggcgcacaccaccacacccagctactttttgtatttttattagagacagggtttcaccatgttggccaagctggtctcaaactcctgtcctcaggtgatctgcctgcctcggcctccccaagtgctggtattacaggcatgagccaccgcagccgggcaaaaataagtttttctaaataaatgattactctttctattctaagacaaaagaagtgagataactgtggtagtaagagtgttactatatgcagtgctacaaaatcaacagtgaccctttggtgtactgtgatttctcttaccttgtgtttttttccagcttctctctcactattttgtctatcttttttatcaggaaaaaggaattcctcatctccttcaacaaatgcatatggatcaattttaggttcttgttctgcatcagatgctattgctgaaagacactggtttttaatttgatattgctgcactaattcatcagaaacttttaaaggtttcttacattgcaccattaacctgcataaaaaaattaaaaaaaattaattatccacataagcattaaaaatttccaaaatgacgttaagtatcataatgtttttagaattacttaaagattatctaacctacaatcccttatttcagaaatgaggaggcatgaaaatattaaataatttattgaagtctaaaatttagccatagagaaatggggccaaaatccaagtttcctaactatatgatctttctaccaaaatatgttgtctttaggtaattcacggtttaggtaactcacggttctcaagtcctcaagcacactattttgtacaaatccattccctgaaaggggctcttaaatctaaactgctccagtacagtgactcaaagtgggagctttataaaagtgagtaaaatacttttaaacaatttatacatttatacaaggaaagtgattatgtattttttttttactgccatgagtagatatactttaagttttaaatttttgaaggcctgatttgtgtttcatgaaaatagcattattactattaattctggcaagatgtttcacaatggaaagtgaagtttcagtgcaagtatctgagttttctaatcacattggcacatcaatttttaagttattagtcttctggttcaacacagcaactaagaaattgtttctctttattctcctaaaataaccaataaaatgacaggagatgacagaataaaagagaagacaacaaggaagttggaaagatgagctagtggaaactgacagaccacagaaagctgaaatctaaggataaaagagggatgccacaacaagaagcaagctgatctataccaaagaaccctggaaagcatcaggagttttttctctctgaagacccgactgctcggtgagtgtgaacacagaatcattagcttctggtttgcataagacatgtttagactctcaaattcctattctctcgggtttacaaagctaaggttctcaggttgtcctaacagtagctagcagccaagcttgcagtcagatcatggccagaatcttgcaatgactatttcactctgagaaaaaaaccaaagtccttataccatcctatgaaaacttcccatcatcttgttcttctcctcttcatcttttactattctagtcctctcttatactgcttccaagggcttcctttatgttcctcaatgggttccagacccattcctggctatttcttttatggggaacattctccttccaaatatctgcatggccaactcgctcacttccttcaagtctttgcttaaatgtcacctatgagcccataactactttattttaaatagcaatatgcccatgcccacttgcctcaataataatcccccttaccctgctctattttcctgcatagcatttatcttttaacatattacataatttattatattcatagttgactgtcactcacactagaacataaaagctccacaaggacaggggtctaacctttgttcactaatttagcacagatgcctagagtacctggtacataataggtgtcaatacttgctagtgaataaatgaaatctaaaaatcacagactgagatgtttttgcattagtactactaaaatacactatcttgtactttgaaataaacaatttttacacactagaaggtaccaatgccactgcttatctactctgagtactaagacaaaaattgtaagatatgtaaggtctggtagcaatgaaggtatttgcagatcgtacattctttgactcacaggcaaatcttatctcattcatctattcactaatgcctaacactagtagcacttgatctcttacaaactcggggcaaagtaggccatcaaaacaaaaactgatttctaaacatgctatcaaatgctcaaatacatatcattattattccaaatacgccccagatttattgcaaaaactaaaatcccaagcatacaaaaactttctgctgtgggaatataatgctagcacactgtcattggggatatgttttataattaatcatcaggatagttctgttctataaacagctgagtatcaagtgtagttttttacctcaccacattagactctaaataacggttagctgaattgtctaccaaatattcactaatgcaaatctttttaaaatagtaattctaactactttgatatgtacttttcttatttaatacttaaaataatattttaagataagaagcaaagggtattatccctgactttgatgtggaaattatgtaaaatcaagggctttgctgaggtcacatagtggcaaagtcagaaatgaaaagattttaagtatttatattcaaataactatccttagggaataaagtataagaaatctcccttcccccagcctgaaagacactactactctctgtagagacaaataaaactcggtgtttcatattacgttgtcctctggcagaagtataaaaaccttcacactgtttacataagtagttgctagactactgtgcagtaacattattaaaaaaaccaactctactgcacagggctctattaaaataaaaaatgagtaaaccaaatgcattacctaaatatgactgtttgttattttattgaatcattctcacagacattagcatgtgcaaagaatttaaatgtagtcaatttcaagagtatcaagacacaataaattttaaaatataaattcatttacattatacattctatatttaaagctgataatagaattaaaaattgttacttttaagagatgccagataaaaaaactctaattaccatactgtcaacatcaattatatagtacacatacacttttagaatacgaataaccctctcctttcctcaaacgaactttcacatacagccaaataattaactacagacacagtttcaattagacataaagctaaatacagacaaactgcaaaaagatcaggtacagccatgaacaggaagtgctgcaaggcccaaagcattatattattcattaattgcaactctttccttttactatgacaataacatactatcctgaaatgtactcatatagaatttaacatagcttatggtagcatatgctgttatgcctttattcaataaaaattcttccagatgaggtatgacagtttttaagatgacaattatagaagcagataagctacagacggaaagttaagaaacaaatgaatgcaataatgtcaaaatcttcccaccgcctttttttttttttttttttttttgagacaaggtcttgctgtcacccaggctggaatgcagtggtgcggtctcagctcactacaacctccacctccagagttcaaagtatcctccctcttcggcctcctgagtagctgggactacaggtgtgtaccaccacacttggctagttttttattttttgtagagacaggatctcactatattgcccaggctggtcttgaactcctgggctcaagtgatcctcccatgtttgcctcccaaagtgctgggattacaggtgtgagctactgagcccagcctaaaatctcccactttttaaatggtacttttttttttttttttttttttttaccgtctcctatattcagaatcaatccctaaactgagccaaggtcactgtcaaaggaaagctttatttgcattaaaataaaacagcaaatatagaagacttacttaaaagatttagagtacagaaaaatcaaaacaagtttatttcatcacagacttctttctgtgaatcaaaggcattcagaactatgttttagagatcaaataatgtattctacaactatatacatacaaatctggtataccactaacacaacataggagttaattctattgatgaatatcatggctaagatatcctgatatactttggctacagaataaaacatgtaaagaactatgctcaaatacagttctttctttgctcagggtttagacaggtttccctctgaatcagaatcacagactaaacaatcacaaattcttctaaaactaagtgctaaacccatgaaaaaaagatataatgtttcttgccagaaattttgctatctttaaaatctatatggttcttagcctctattctgaaatacatgctatcattaactaatagataaactaaaaagaattagaaaaaaagatatttgccacgtgtatcttatatatgggttatgctatgttccactccaacctctccttccccacaagtaaattctaacaaattagagaaattttacttttacaaacatagtcaatgaaaagttaaacataaaattgctacacatgaaagtctaagaataaaaaaggtactcagaaatgataaattctataatgctatactagttaggtagccatcaccacctgaaactgctaatcagaaaaatcaagagggctgggtgcagtggctcacatctgtaatcccagcgctttgggaggccaaggtagtagcatcaccggagaccaggagttcaagaccagcctggacaacatagcgagatcctgtctaaaatcctggctaaaaaaaaatgtttttaattagccaagcggtattgtcacatgtctgtagtctcagcttcttgggaggctaaggaggatggatggcttgagcccaggagttcaaggctgcagtgagccatgatcatgccactgcaccatagcctgggtaacagagcaagatcctctctcataaaaagaaaaaataaaaatcaagagtattaatttctttcactaacccactactatggaaggacagtgccacctttcaatagcaatcaatggaaacatttatttacaccaaacagaaaatggagtttcacttaacacaaataaaacaaagctttgaatttctcctaccgtaattttctatgaagtcacatacctgtaaaagttccactattataaatccactagttctctgtttctactgatgcattcttgtccttttgcattgtatatctactctaactgggttatcagcaatcccctctattaagtttcagacatgatcccaaccgcctgatggaatctctcagcaggcacctcaaactgcattcacatgtttacgatgtactcacattacatgtacatagctaaagtcatgtagtacaaaaagatgaaaagcctaagtatcaatctctctccttcaagataacaagtactatttctatcatctaattaaggtggaaaaaaacctaggtatatgccagcatatatgtatgcacatatgtactttggttcctcatctacatacagagcttctcatatcagcctatacagatttcctttgcttatttaagtggatatgccattattatttagccagaccttcattatttagcaagaccttactttcataaggtgtatcaatagttttgttttttgttgttttattttttggagatggagtcttgctctgttgctcaggatggagtgcagtggcgtggtcttggctcactgcaacctctggctcccaggtttaagcgattctcctacctcagcctcctgaatagctgggattacaggcgcctgccaccacgcccagctaattttttgtatttttagtagagacagggtttcaccatgttggccaagctggtctcaaactcctgacctcgtgatccacccacctcggcctcccaaagtgctgggattacaggcgtgagtcactgcgcccagcctaggtatttcaatagttattccaaggtacttctacttagaaacgctactttaaaaaaatcagaaaaattaagtttggtaagatttagcctaaagtgggtaaaaacaatggtacagacaccttcaaacctattctttctcatctttctacctcatgaactaaatacgcttggccttaaactctcctgttattctcctactttactgtttaactggctgcaaagttcttcaaaatatattccacagcatctataacattcatacatccctgctacttctaatttcccagtgtcggcctcacatcactttctatatgagttgtccaaactgatctcctttcacacagacatatcttttcatttcaagcaacctttcaataacattacttggtgagtttttccaaaatccttattttctaaaacttgtcattttatctcactcaatacttgcaatagtccctccatcatctcaaggataatatacaaacttatgaatactattctgctattccattctatagtcctacgcttttcaggtctcatttctcatcatgacacaccaaactactaaggagcacccctataatctaaccataccaaactacataaagcttctggagcttcataaatggaattaaattattccccactctgtgtctgtactatattttatttatacctctatcagataatatgctattttccattagactacaatttcatttatggtcaagagtaaatttattttatacactaacagtgccccacagcatcctgcgtaagagaaacttcagttttattgaaactgattttaaaaataccttttaagaatatgaatttaaaaagaaaaataatactcctaagaagagatacaaaatgcagaggacttgcaacagccctgtaattaactttattaaaattaactgctaaacatttaaatgcactttcaaaactcaaagaatggaaaaataataatagatatttacaatgactaggtgacagaaattcaccaatttactaatataaacaaaccaggcttctgaatgaattactctatgactaaagaggtgtttgatcatattacatctttaaaattgtaagtgcttccagaaagaatttaagagggttgtttaaatgccatcaaaagagggctgggcacggtggctcactcctgtaatcccagcactttgggaggctgaggtgggcggatcacctgaggtagggagttcaagaccagcctggccaacatggcgaaacccgtctctactgaaaatacaaaaatttgccaggtgtggtggcacacgcctgtaatcccagctactcgggaggccaaggcaggagaatcacttgaacctgggaggcggaggttgcagtgagccgagattgcgccactgcactccagcccgggcaacaaaagcaaaactccatctcaaaaaaaaaaaaaaaaaaaagccatcaaaagagaataacagtaattcatggaatttattttaatgacagggaacatcatctaactttgtcaattggctgtaccactttctacaaggagacaactattattttgatccttgtcacatcatatctgaagcaatattaacagcaggtaataaattatccaattattccaacaaaatccttttcactataagaaaaaaaagcatttttgtttcagcatataaaagaccatgtcaagtatctcactctagtttggagtgactgaaatagtatggggaatctccccaatgaagtcaatcagtaaacacgctgatctttctaataactattactttagaattcaattttctgttacaagttattcattatattaaagtaccttaacacttctaacacttcgagctggataattttttgttatgggagattatcctgtgcactgtaagatatttagcagcatctctaatttctacctactaggtgccagtagcacaccccaaggtgataaccaaaaatgtctctacacattggcaaatgttacctggggatggggctggagggatataaaattgccccagttgagaaatactacacagaacaataattccaggaaaaggatagaatcatccagatgattatttttaaaagcaaacttttaacctaccaactatagaacaatttatattccataaatgcttcttagttaacatagcagctaagcctttgatggttcaccttctggatatttaccttatcatctaatctattatcatactacaaaaacaaggcttatatctaaaagcaaattgtggccaggtgcagtgcctcacacctgtaatcccagcactttgtgaggctgaggcaggtggatcacctgaggtcaggagttcgagaccagcctgaccaacatggtgacacctcgtctctactaaatacaaaaaattagtcaggcgtgatggtgcatgcctgtaatcccagctacttgggagggtgaggcaggagaattgcttgaagccaggaggcagaggttgcagtgagccaagattgtgccattgcactccagcctgagcaacaacagcaaaactcaaaaaaaaaaaaaaaaaaaaaagcaaaaagtgaactgtgacatgatacacatttcagtaactagtataaccaaaacaatattcacataagacatatgattaaaattaaaactcttttattcaatcttttttttcccttgtctataaggcagaaaaaaagggtgacaaggaataggcaaagcatgttatttccttaacttacataattacaatccagtaccactctaccctgcacgctacttttctacactatgcttcctccttctcattcttattcagtgagaaaaatgtcaaataattttagaacagattttaaggttaaactgtattaacttctaagagaccttcattttacttacagatagtcatgtacacaagcaaccaatacatttatttaaagttatggctagaattaacagctcttatgaatacaatgtgcccacaaaaactcactattgaaggttttaaaaccaaaaaacttcataccaccacatttttacacacattaaataagaaaatataacctggaaagaaaacaagttttaaaatagtattttagggccatttcattcacccaaacatttgctgaatttctattgtgtatccagaattgttctaagggggtgtgtgtgtttatgctagaagaatacagcagtaaacaagacaagagtccttgccctcatagagcttacattctaatagggaaaagaccattagcaaatacataatataatttcagatatatgctaagaagaaattaaaagcagcatacaggataggcagtgatttgggagagaaagaccatagtttagataaaatggtgaggaaaatcttccctgagaagataacttttgagcagcactgaatgataagaagggataagcagttcaccctctttataatccaattctaaaaggccatgaggaatgagcttggctttttgaataatttatcaaggatgctggtgtagctaaatcaggagacaagtaggataccagtaggtaacatgggtgaagaactagggaggcaagagactgcatacaatcttacagatcaggagaaagggtctggattttactctaagtgtaaagggaaactatgggagagatttaagcaaataagtaagacaatattttacttgcaatgattaccctcactgctgtgtagagaatacatgtagaatagaaacaaggagactagtaatctcaggccaagagctgaggctggcttagacttatactacatttagcaagagtaagattaagatcttttaaggcttgtttctaagacatcatttacttttttttttttttttttttgagacggagtctcgctctgtcgcccaggctggagtgcagtggagtgatctctgctcactgttaacttccgcctccttgttcaaacgattctccttagcctccaagtatctgggattacaggcgcacgccaccacacccagctaatttttgtatttttagtagagacagggtttcaccatgttggccaggctggtctggaactcctgacttcaggtgatccacccgcgtggcctcccaaagtgctgggattacaggcgtgacccaccacgcccagccctaagatatcatttactttcaagagacctgctgactattaaataagctcactgtcttccacaatccctaagagtatactgatatctcttaattaacaatccagattaattttaattaaaaataaaatcatagatgggcagagtggctcgtgtctgtaatcccagcacttggggaggctgacacagactgatcacttgagatcaggagttcaagaccagcctcgccaacatggtgaaacctgatctctactaaaaatacaaaaattatctgatcgtggtggtgcacgcctgtaatcccagctattctggaggttgaggcacaagaatcgcgtgaacctgggaggtggaagttgcagtgagccgagactgcgccaatgcgctccagcctgaatgacacagtaagactctgtctcaaaataaataaaataaaataaaacaaaataaaatcatactaaaatacttttagattcaaagggccagatgaagcacaggacttatctgctaaaatgacgataaaagcattttaatttactattattttttaagagacagggtctcactgctgcccaggctggagtacagtggctattcacaggtgcaatcccaccactatcagcataggagttttgacctgcccatttccatcctaggctggttcaccagtcgtcaggcaacctggaggtcaccatactgatgctgaacttgatgcagacacttaatcggcatagtgcacagcagcccggaactcctgggatcaagcaatcctcctgacacaaccagagcactcggctaggtattttaacagagaataaatctctaacagtaggaaaaatgagagagaggctataaatggaccagatgtttcactaagtctcagggaagctcaaaataagataaaatacagcagaaaaagttcacagcctacaatatgcaaaagaagggattatagcccaactacataaacaacaggagagtctaactgcctggaaaagtgagaaaaaatccggacagaaatgagaagaaggggttactttggtcacactgcctatgggtgtagccctgctctgcaaggagcagtaaaaaaaaaaaaaaggggggggggagggaaaaagaaaaaggagaaggggagacaggaaggagaagaaaaacaaaagtgagaaaaagagctgaaaatgggacaacaagaaagattcctttttaaggaaaatgaataaactacctgtcaaaataagtataacatccttttcattctggaattttaggaatggttgccttcccttccaaaaattccccatccagttatcataaagcgaattatctgacacctatacacattacatactaaagtatttattgaatgagcaaggaccaccagtcaacaagctctacctatatacaacatttccaatcagtctatctattctctcacattaaaatacgtctagacaggccaggtgtggtggctcatgcctgtctgtaatcccagcactttgggaggccgaggccagtggatcacttgaggtaaggagttcgagaccagcctgaccaacatggtgaaaccccgtctctattaaaaatacaaaaattagccgggcatggtggcacgcacttatagtcccagctacttgggaggctgaggcaggagaaacgcttgaacccgggaggtggaggttgcagtgagctcagatcacaccattgcactccagcttaggagacagaatgagactccatctcaaaaaaataaaattaaaataatagtaacaatcaagtcgggcgtggtggctcatgcctgtaatcccagcactttgggaggtcaaggcaggcagatcacgaggtcaggagatcaagaccatcctggctaacaaggtgaaaccccgtctctgctaaaaatacaaaaaatcagacaggcgtggtggcacgtgcctatagtcccagttcctctggaggctgaggcagaagggctgcttggacctgggaggcggaggttgcagtgagccgagatagcgccactgcactccagcctggacaagagagcaagactccatctcaaaaacaaaaaaacaaaaaacaaccagaaatacgacaagaagaatccgagtaaagaacaagaccaaaataaagtaattctagagaaaaataaaatcacagaacatcaaacaacggaatgttatttttaaaaaaaatcagttgagaatgtttttaaaacatgagaaagaaaaattcagaattcaagaaagttgagaatcccctgagaaaacagagcaccatctgaatcatggaagttttaaaaagaattttttaggagatggtattacctaagaaatagagaatttccaaatggcagaacaaaggccttcaaactgagttagaccttggccgggcgtggtggttcacgcctgtaatcccagcactttaggaggccgaggcgggcggatcacgaggtcgggagatccagaccatcctggctaacacggtgaaaccccgtctctactaaaaatacaaaaaattagccgggcatggtggcaggcgcctgtagccccagctacttgggaggctgaggcaggaaaatggcgtgaacccgggaggcggaacttgcagtgagccaagatcgcgccacttcactccagcctgggcgagagaacgagactacgtctcaaaaaataaaaaacataaaaaattagcagagtgtgctggtgcgcacctatagtcccagctactcgggaggctgagacaggaaaatggcctgaacccggaaggcagagcttccagtgagccgagatcacgccactgcactccagcctggaggaaagagcgagactgtctcaaaaaaaaaaaaaaaaaaaagctgtgcgcagtggctcacgcctgtaatcccagcactttgggaggccggggcgggcggatcatgaggtcaggagatcgagaccatcctggctaacacggtgaaacccccgtctctactaaaaaatataaaaaattagccaggagtggtggtgggcgcctgtagtcccagctactcaggaggctgaggcaggagaatggtgtgaaccaggaggcggagcttgcagtgagcagggatcgcgcaactgtactccagcctgggccacagagcgaggctctgtctcaaaaaaaaaaaaaaaaaaaaaaaaaattgagttagcctttcaagtgcccagcacaaggactggaaaaaagatcattatacctgctacacagattcttgtgacatttctaaagctaagagaagaccttaaaagcctcacagaagagatcgcgtttttttaaatgagcaagaatgaaactcattattacacatttcttctgaagataccagaagacagtaaagcaatgcctatgagttcaagggggaaattattttcaattatgaaaccaacatgtagccaaattatcaatccaagcatgagggcaaaaaaatcaggtcattttcagaaatacaaaggatgccaaatttatctcccactcttccccccgccgccccctccccccgagggagctaaagatattcaccaagaaaataaaggcaaaaccaaaaagaagccactagttataaaaaattgtggtattaacttgagtctaatcaaaatgaaatcctagagagctgaaaacaagtctagaaagcaactggttcacattataacagaaataagaaagtattaaactccatataatagttacattatctggagcaatctgatgttgagaaaaaaagctacattaaaaaataaacataaatcgataatgaaaatgtgacattttaagcaaataaagtctaagacattatttaacctattagtagcatttaagcaataagcaagtaattcactaaaaaaaaggtaattcactgacaatgatctgataaggaaggaatcgtaatctttgtacattccttggccttgtactaataaataggtagacagttctattgagcataatggtattttactggttgattttcaccttttagaaaaatttatatgtaaaaggcttattagacagactataaatgtattaataacaacatagaaagtcaagggatacctggaaaaaagccttcttctgcccaaagtataacattaatacagtggacaaagaaggcaaaccaccaatggaggaagaaacctatagcacataaaactaatgcaggattaatacccagagcatgcaaataatacatcagaaaaaaaagaaaaatggactaaaaaatacgatgactaggcaagtcacagaacaggaaacctaaatacacccaaaacattttaaatgatgctcaatctcactagaaatctggaagacacatatttagacaatgagatgacattttgcatgctgtaaattactgaaattaaatcttgtaagaccaactatagaggaaaatatagtgcaacagccattctcatacactgctggttcatgagggtttaaactatataccagttgctgaactgcaactgggcaacaacccttaatgttgaaaatggacatagccatgttgaaaatggcttttagatgtatttcctaaaaaaattcttatacaagtaaacaaggaaatgtgtaccaaacaaaatggaaaatgttagggtgaaaaactgaaaataaccaacatatccatctttaagagtttaggtatttactatatattcataaggaaataccataaagcaattaaaatgaataactagagctacacgtataaaaacatgtactgaaataataagtaccaaattgaggccaggtgcggtggctcatgcctgtaatcccaacacttcaggaggccgaggtgggtggatcacttgaggtcaggagttcgagaccagcctagccagcatggtgaaaccccatctctactaaaaatacaaaaattagctgggtgtggtggctcacacctgtaatcccagctactcgggaggctgaggcaggagggtcgcttgaacccagaggcggaaatttcagtgggcctagatcgtgcctctacactctagcctgggtgacagagactctgtctcaaaaaaaaaaaaaaggtaccaaattcaggacagtggaaggaagactggaagaagaaaaacagtacatgggaattctaactgtatgtaaaatccttaagttggctgatgtacaagtgtttacacattattttctccactttttgtggctaaagttatttcataatgaagaagttccctgaggaaaaaacacagtaaaggaataatgcaaagttaatactcaatgaatttattcttgtaaatcctaccttgaatccaatactgagtcctagtattaagaacttgcatcacttccacccttaaattataatggtgactattaaaaaaaatacatactctgtaactgatgttacactttcctgtccaaaaggtccaactggatcatccttgaatttatcacttggaagttgaggtggtaaaaactctacatcttttttctttgggaacttgtaatacttccaggctatattggcttcatcttcttccaagtttactgctgtaccaacatatactgtaggttctacagcttcctgatattgaggtgggaaagactgggacaaactgtctatcctatcttccattggtttagaaggaaccaagggatctggtgttggcatttgataaaaatgttgactctgaggagttgaaggtgttttagtcactccttcatcaaccacatcacaagggtgaggactaagtgggggtggttgaggtgaatttgccatttcggtgccatgcatctgaggagtctttgctacatcattagttcggatatttgaaaatctcacttgactgtctggagcagagatcacaagtctttggctggctgaatctgcgtccatgccaacatcatcactaacagacacacgatggtgaaaaggagtcaaggggcgtttctgtggcttttcactcttttcttgcttctcattggtcttgtgcttaggaagtatttgttgttgctgacctaaagatggtgcctgtccttgttgtccagcatttcttgacttgagatttttgtgcctgaaaagtgaaaataaaggtttcatatttacagtatcactattatggcgaagtataataccagttaatagtattagacacttcggttatcatttctttttcacatgtaatactaaaagtaaaataatttgaatttgaaaggggaaaaaaatactttgctcgtgacctaaataaaatataagggcatgcagaaacattcataaaagccaattatctcatgctcatttaatagccatgtgatcagacagccaaagattatgtcttacatgatttaaatattttagtatctaatttaaatatagaggtaagattctagttaaggttaaaaggtataacaaggcttgaaatttactcatttttaaatgtacctgatatttcctgttagtaattattataaattaatggcttggctaagcttagtcatcacctacaatcctacagcaactggccagaaagcgtattctactctactaaatagaagttacatcagtctggaaagtgctagaattgactgattgatgggcctcacaccatacctaccttctccaaatacttagcactacaaaaagaataaactgactagaaaagggaaagaaaatgcctaaaataatttcttcctcataatttgaagcaattctaaaacgaagaacttaaatgatacacctaaaaatcaaacaattttgttaagtttaagatttctaggctgggcatggtggctgacacctgcaatcccagcactttgggaggatgaggtgggcggatcacctgaggtgaggagttcgagaccagcttggccaacatggtaaaaccccgtccttacaaaaaataaaaaattagccaggtgtggtggcacgcgcctgtagtcccacctactcgagaggctgaggcaggagaatagcttgaacccaggaggcagaggttgcagtgagccgagatcacgccactgcactccagcctgggtgacagagcaagactccatctcaaaaaaaacaaaaacaaaaacaaacaaaaaaaagatttctttcagtgcgcactgagatttccactcaatgagagatatatatacacataacattatttttacactaagaaactttttttttttttttttttgagagggagtttcgctcttgttgcccaggctggagtgcaatggcatgatctcagctcaccgcaacctccacctccggggttcaagcgattctcctgcctcagcctccctagcagatgggactacaggcatgtggccaccatgcccggctaattttgcatttttagtagagacggggtttttccatgttggtcaggctggtcctgaactcccgacctcaggagatctgcccacctcggcctcccaaagtgctgggattacaggcatgagccaccgtgcctggccaagaaacttttaaaatgtggtaagatatggagtttacacattcagtattcattaggttttactttttaaattttacttttttgctgaatcagagctatccagaaagagtattaaaaagcagtgacaggcacttatttgaaaaactctgttgagaagacatactgagacacttttttttttttgagaccgagtctcactctgttgccaggctgtagtgcagtggtgcaatcttggctcacggcaacctccgcctcccaggttcaagcagttttcctgcctcagcctcccaagtagctggaactacaggcgtgcaccaccacacctagctaatttttgtatttttagtagagacggggtttcaccatgttggccaggatagtctcgatctcttgacctcgtgatccgcccaccttggcctcccaaagtgctgggattacaggcgtgagccactgcgcccggccgagacacctttttgtacagagcctgagatatcttattgtgcatagagaaaaaaaagaaccaaagttatcaaaaaaaaccaaactcgtttcaaaaggacataggagaaatccaccattatcctaatattaaaatcaaagatattacacaaaaagaaaaccatagaccattatctcttaagaacacagatgtaaataattaacaaaatatcagcaactcaaaccagcaaaatataaaagaataacacatcatgaccaaatgaagttaattctgggaatgtatggtgtagcattcaaaagaaaaaaatatcatgcatcacattaacagaataaaagaaaaccatattatctcaataactatagaaaaaaccctattaatactattaatatattcaacccctatttatatacactcggcaagcaaggaataaaagaaaatttgcttgatctgatggatatctatgaaaaactacaactaatatcttacttgatgtttaagcatgaataatttctcaagattaagaacaaagcaagaatattagctctcaacatttaacattttactgaacgttttacccaatgcaataaggcaagaaagaggtcagagatttcggaggaagaagataaattgtctttattcattgtcaacattattacaaactatacaataaggccagatgcagtggctcacacctgtaatcccagcactttgggaggccgaggtaggtggatcatgaagtcaggagttcaagaccagcctggccaacatggtgaaaccccgtctccactaaaaacacaaaaattagctgggcgtggtggtgggcacctgtaatcccagctactcaggaggctgaggcagaagaatcgcttcaacccaggaggtggaggttgcagcaagctgagatcacaccactgcactccagcctgggcgacatagcgagactctgtcccaccccccaccaaaaacacaaacaaacaaaaaaagtatacaatgaaagggtcaggctgatccccacctaatcaatcttaacattactagatatgggacaaccagatactgtctctctctgacgtaacataatacaaagcaacacagccaccatctatgaagtactcttgccaaaaatattgaagttgagtctaatcaagtaatcaagcccccagatcagcactgagcactgtctagaactttctatgatgatgggaagttctgtatatgtttttatatatatatatatatatattttgagacacagtttcactctgtcacccaggctggagtgcagtggcacgatctcagctcaccacaacctctggctcctgcgttcaagcgattctcccacctcagcctcccaagtagctgggattacaggtgcccgccaccacactgggctgatttttgtattttcagtagaggtggggtttcaccatgttggtcaggctggtcttgaactcttgacctcaaaagatctacccacctcggcctcccaaaatgctgggattacaggcattagccactgcacccagcctgtatatggctcttgagtacttgaattgtggctagtccaattgaggaactaattttttaagagacaagtcttgctctgtctcttaaaaggctggaatgcagtacaatcatagcacactgtaacctcaaattcctggactcaagagagcctcccaaagtgctgagattacaggcatgaaccactgtacccagctgaggaactgaatttttaattgtatttaaatccaattactgtaaatttaaatagccaatagtagttactaacacagctagtattggatagctcagctctacagctaccttccatttatagaaatgcaaaggaaaaaggaagaaattaaattacactgaaagaagtaaaattacatgacaagtaaaacgaaaaatccagaatgtggggcactctataggaggaactgacctagttttaccaaccgagtcaatgtcatgaaaagggagcaggagacaactaaaaggagagatttagaaaacataacaaccaaatgtttactccttgtttgaatcctagtcaaataaactatctacaaaaagacatttctgagaaaatctggacaaggtatcataatattaggtatgacggtagaattatattcatgtaagaagatattcgtattttttagagccgcatactgaagtactgcagaagtgtaatatttaagatttgctttaaaaacctttatcaagagcatagcataaggatttgccaaataaagtattacatatctataaaatgcagtattatgaactttttaaaaagaatgaatctgtaagtgctaacatggataaacacccaggctgtttatcaaaaaaacaataagttgcagaaatacagcatgattccatttgtgtgaaagaaagcaacaggcagacctacatacataagaggggaacctgttaatttttaattttatattcttgtgtactgtttgaacttttaattttatttatttaacttttgagacagtctcgctctgttgcccaggctggagtgcagtggcgtgatctccgctcactgtaacctctgcctctcaggttcaaatgattctcccacctcagcctcccgagtagctgggattacaggcacctgccaccacatcagtctaattttatatatatatataatatagatatacacacactatatatatatacacacacactatatatatctatatatatacatacacactatatatatacacacacactatatatatgtgtatagtgtgtatgtgtgtgtgtatatatatacacacacacacacatacacactatacacatatatatatatatatatatatatatatatatatatatatttttttttttttttttttttttttttttagtagagaccggtttttgccatgttgcccaggctggtctcaaactcctgatctcaagtgatctacccacttcagcctcccaaagtgctgggattacaggcatgagccactcacccagcctgaactttgtaaaagagcatttttttttttaaacacagaaatttgttcaaaaacacaaaaaaccaagaacaacaacaaaaaaaaaaacccagcaggtcctacccaacgtatgaataatcccttctctttttttttcctcatgctgttgcccaggctggaacacagtgccgcgattagcgctcactacagcctcccaggtagctgggattacaggcaagagccacctcattggcttgaatgggttctttttgaatactttcaatgacaaggaccatactactgtataaggagatgcatccccctcatcaaatagctccaactgctagaaggtaaattcttaatattgaatagaaattcatcttttctgtatcttccagcccttcagtcctatttctacctaatttataaagctgcactatccaataatggtagccacaagttacatgtagctattagacacttgacaagtggctagtccaaattgagatgtgctatagatgtaaaataccaattttccaagacatgttataaaataaagaaatgccaaatatcactaatgtttcatcacaattactgtatgtcaaaataatattttagataaatcaagttcaataaaatatattgggctgggcatggtggctcatgcctgtaatcccagcactttgggaggccaaggcggacggaacacctgaggtcgggggttctagaccagcctagccaacacagtgaaaccccgtctctactaaaactacaaaaaattagccgggtgtggtggcaggcgcctgtaatcccaactactcaggaggctgaggcaggagaatcacttgaacccaggaggtggaggttgcaagtgagccaagatcacgtcactgcactccagcctgggtgacagaatgagactccacctcaaaaaatatataataataataataaataaataaataaataaagtaaattaaacaaattttaaagatcttcagcaagagaaaaggtctagttgaagcaaacacagtaagtgaatacgaatggttgataaacaggaattcattgcccaattcgcttacttttgtccatgtttgaagtttctaataacaaaacagagtagaactaaaatgctaaaaaaaaaaaaaaaaaagcatgaaagatttgaggagcaagattaaagtattccaaggtctttgttcattccataaaaagagcgtagactctaactttagactttaaggaaagcaggcataataaatgattaattcaattaacaaaagaacaaaaatagaacaccaaacttctaaatcaagagaagaaactgaaaaaaagaatataaaaaggaaaaaataacagtatcattaactcatcaattattcaaatatttgtctactaaattcaaagtatggtctatgaaccctccttttcaggggctacaggggttcaaaactattttcataatagcatcaaaacagtatctgacttttttattatgttgaaatttacaaagatggtgcaaaaacaataggcagcaaaacttctagcaactgaacatgaatcaaagggagtggtaccaactgtactagcagtagtagtcactgctttctccaccaccacacattcagtttgttgttttttatgatagtatcacttaagaatgtccttcatgaagacagcaaaaataatttttattaatctcaatccttatacaatctttttacactctgtataaagaaataggtagtgcatataaagcatttctgctatagatttgaagtacaatggctattttgaggaaaagcgcttgtacgactgagttacaagctgaaactagcttttttcatgaaacaccatttgaagaacaaaggactggtagataaactaagattatccatatttggtcatttggcagatttgtttattaggttatcaaacatgaacaaaatgagtttgtcatttaaggaagaactaatcattttgagcttgactgctaaacaatgactactactgctaatacagttggtaccactgcaatatttagaattttggaaaactatctgacacagtgcttgagctttctaatacttaaatacttttcaggtgagatcactggcaatattaatgaatgaaatattttgatactctgcattggctgaattccacatcctcaaattcaaccaaccagagatgaaaaatattatttttcaaaaatgaaaagttaacagtacaagaataaaaaataatataaattgtaaaaacaatacggtataacaactatttacgtaacacattgtattaggtattataaacaaactacagattgtttacactgaagggccaggtacagtggctcatgcctgtaaccccaacactttgggaggctgaggtgggtggattacttgaggccaggagttcaagaccaggctggccaacatggtgaaacccaatctctattacaaatacacacacacaaaaagttagctgggcgtggtggcgcatgcctgtagtcccagctacttgggaggctgaggcacgaaaatcgctcgagccagggaggggcaggttgcagtaagccaagatgacaccactgcactcctgcctgggcaacagaggcaaagaccctatctcaaaaaaaaaaaaaaaagtatactgaaggatgcatacgggttatatgaatactaactcattttatatgaaggacttgagcatccgtagattttgttatctgtgagggttctagaatatcgatcctacacggatatttagagatgagtatatataacaaaatgtgccaacattcagatctatataacccagtgaactgatatttttcaaatgaccaatgcatgatgttacaaaatcgaaagatccattcagttattagtgaagtacaaccactgacagggctttagattccacattccaaccaacccttaagaaactaccacttgtcaatttttggtgtagtatcaaagaagaatatccacaattatctgaaaaagttattaaaatactctcttcccttctccaattgcatagctacatgaggctggattttcttcatatacttcaaccaagacaatatccagcaataggccgaatgcagaagcagatataagaattcaactatcttactacactcaatattaaagagacttgcacaactgtaaaacaatgccactcaattagctttttggctactgttttggaaaatatagtggatgtctattttattcatgttaatatgcactgaaattattgtttttaataagtggtgctttaaaatttctctaaaatataaatagatgtaataaacgtactttgcagtcttcggtaattttttaagactgtaaataagttctgagacaaaaaagtttgagaattagtctattttatgcaaggcagtaggagaaataggatctccattcatctgaggtgaactatttagttatgtcccaagtgtacaagggatgtgaaaagtaaatggccatacattcacttacccagctattaagagtaagaaactattaactggggctacatactaatagcagcagttctctaaatttttgacaacattaaatcagcccttttcttctatacagacctctttctaaaagctagtttctttagagagtacaattgaatttctttttttcttttttttttttttgagacggagcctcgctcttgtcacccaggctggagtgcagtggcacaatctcggcttactgcaagctctgcctgccaggttcacgccattctcctgccttagcctcccgagtagctgggactataggcgcccaccaccaagcctggctaatttttttgtatttttagtagaaacacggtttcactgcgttagccaggatggtctcgatctcctgaccctgtgatccgcccgcctcggcctcccaaagtgctgggattacaggtgtgaaccactgcgcaaggccaaacaactgaacttcatgctagaacacaaccacattgagcaatctttgtaaaaaaaagaaattgtcctcaaagcacaaaccaacagagtaatccttttagattattttttcctattgatgttaggtatgcagtactttaatgttaacatgagaaatttaatgtattgctttttacttagcagcctttctttttttttttatgaagattaaagaaaaccttttattgaggtataacttacaataaatagtgcacatttaagtgtgcagctcctttaattttttacatatgaatacatcattgagactttctgtaacccactttatactgtagtttgctttttatttttctttttttagacagtctcgctcttttgccaggctggagtgcagtggcacgatctcggctcactgcaacctctgcctcccaggttcaagcgagtctcctgcctcagcctcccaagtagctgggactacaggtgtgcatcaccacgcccggctaatttttttttgtacttttagtagagatggggtttcaccatggtggccaggatggtctcgatcttttgacctcgtgatcctcccgccttggccttccaaagtgctgggatttcaggcgtgagtcactgcacctggcctgctttctttttttttttttttttttttaattgatcattcttgggtgtttctcgcagaggggtatttggcagggtcataggacaatagtggagggaaggtcagcagataaacaagtgaacaaaggtctctggttttcctaggcagaggaccctgcggccttcctcagtgtttgtgtccctgggtacttgagattagggagtggtgatgactcttaatgagcatgctgccttcaagcatctgtttaacaaagcacatcttgcactgcccttaatccatttaaccctgagtggacacagcacatgtttcagagggcacagggttgggggtaaggtcacagatcaacaggatcacaaggcagaagaatttttcttagtacagaacaaaatgaaaagtctcccatgtctacctctttctacacagacacggcaaccatccgatttctcaatcttttccccgcctttcccctctttctattccacaaaaccgccattgtcatcatggcccgttctcaatgagctgttgggtacacctcccagacggggtggtggccgggcagaggggctcctcacttcccagtaggggcggccgggcagaggcgcccctcacctcccggacggggcggctggccgggcggggggctgacccccccacctccctcccggacagggtggctggccgggcggggggctgacccctccccacctccctcccggacggggcggctggccgggcagggggctgacccccccacctccctcccggacggggcggctggccgggcagaggggctcctcacttcccagtaggggcggccgggcagaggcgcccctcacctcccggacggggcgagcagcctgctttctatgtgcagttttcctatgaacattccaccacactaaagtctaatatcagtaaatgtgcgctattcaatctcgctaatgaaaaatgcgacaaacaattttatgcttctcacttattataatggcaaaaaataattttgaggatagttctcagatcagtgaaatcacaagaaaaaccaacattttctatatgcaaaaagtgtgagtaaaatcggtagaaccttttttgatgtcacacgtacttaaatagccctctcgcctacaactctttatcacatcacccacctagtttatttccttcccagcactcattcaaatttaaaaaggatttaaaatccttctaaagcctgggcacagtggctcacgtctgtaattcctgcactttgggaggccaaggtacgtggatcatttgaggtcaggagtttgagaccagcctgaccaacatggtaaaaccccatctctactaaaaatacaacaattaatctggatgtggtggtatatacctgtagcaccagctactcaggaggctgaggcacaagaatcccctcaacccaggagacggaggttgcagtgagctgagatggcatcactgcacttcagcctgggcaacagagcaagactgtctcaaaaaaaaaatatatatatatatatatatattcttaaaaacaaattatctgcctcacttccaagagaatgcagacttcataatagcaggagctttgttagctagtgtattctgagcctaggacaccttctgtcacagagtaaggattcaaaaaaacctactaaataattgatagttacagcagtattactttttttttaaagcaagcacaagcaaaaaacacctatggaaacaaactgtatgtccatcaaatccagaatgattacataaactatgatacttccattcagtggaatattaataacatttttttcatttttcttttaaaaaagagagttatcactacattgtccaggctagtcttgaactcctggccccaagcaatccttctcccttggcctcccaaactgctgggattacaggaatgagccaccacacccagccacaggaaaatttttaaacaatgaagcagagctatataagtaactaatatggaaagatctgaggcacattaagtgaaaaaaattagctgtgaaaaataaatcagaataatacttatgtgaggccaggcatggtggctcatgcctgtaatctcagcactttgggaggctgaggcaggaagatcgcttgagcccaggagttcaagaccagcctgggcaacatagcatgaccccgtctctacaaaatatttaaaaattatccgagcattgaggcacacacctgtagttctagctagttgggagactgaggcaggaggatcgtttcagcccaggagtttgaggctataatgagccatgatttcatcactgcactccagcctgggcgacacagctagtctctaaaaaaataataatatttatgtgttgagaggagaatacataaaattaagtatggagaaatagtatctaattggcaactagccacttctagggagagtgagtaggcttgggggagagaaaggatggtcaaggggaacttaggctttattcatatactttaaatttcttaaaataatttctattcatgtaaattgtctgttacagttatgaattttttttcttcccaaatcaatttttaagagaagccaatgttatcaggcagggtccagacctatctttcacacagaagaaattcactatagagaaccggttatacaaaacagaggaaagtgaggaaacccagagactagtaatagcagggagcttctatgacttctagcactgaaaggacaataagatgatgtagtctcaccatatcccagaagctcaggatggtgctagaaccatagcaggatctgctcagtagtaactgggaccatgaggaaggggctgtgttaataggacacaagggagctgctgctggagttggctcaaaaagggactggggaaagaccctggcttcttccctcctctcaccctccaatcttctgttagtgcctcctattagccaactccagaaagcaaacgagtctaggaaatttaattccctgcaatacagaacagaacagagaaaaagcagaaatggatttgagagcgagctagaggccgatttaacagagtcagttatcaatgtatgccccccaacctcctatatattctatggcaaagaggatacacatgtagtagctcactgtctatctgtcttaccttcacttaagaaataagctagatttgtggtgggcagaagacctaaagtacaaaatgtaatactaatttttttaagtaaattattagaaatgctgtatttactaaaggagcaaactaaccaaagcaagtcacacgtatcgattatgtaaaattttagcatattaaatctctatatgcctctgagaaatttctgaaaatacttttaaaaatgacttttttttttttgagacggagtctcgctctgccaccaacaccaaagtgcagtaacgccatcttggctcactgcaacctctgccttccgggttcaagcgattctcctgcctcagcctcctgagtagctgggattacaggcgtgtgccaccatgcctggctaatttttgtatttttaatagagatggtatttcaccatgttggccaggctggtcttgaactcctgacctcacgtgatccacctgcctcagcaacccaaagtgctgggattacaggcataagccactgcgcctggacaagagaaaacaactttttaaaaataaaagttcagcttaaagaccaagaatttaaacctgtgttgccaacatgcatattttaatgccttcctctaaaaccattttagacaaaatacttaaaatccaccttttcaaaaagaataaaaaagtctagtttaggaactaaaacagaactatttgataaaaattccactagtgggaaagaaaatcctaatttatttttttctcaacttttattttaggttcaggggtaaattcgcaggtttgttatataggtaaactcatgtcatgggggtttgtttacagattatttcatcacacaggtattaaaggactagtatccaatagttattttttctgctcctctccctcctcccagcctccactggacccagtgtctgttgttcccttctttgtgtccatgagttctcatcatttagctcccacttataagtgagaacaggcaatatttaattttcagttcctgcattagtttgctaaggaaaatgacctccagctccattcatgttcctgcagaagacatgatctcatttttttttatggctgcacagtattccatggtgtacatgcacattttctttatccaggctgtcagtgatgagcacttaggttgattccatgtctttgttattgtgaatagtgctgctatgaacattcccgtgcatgtgtctttatgacagaatgttttatattcctctgggtatatatatccagtaataggattgctcggtcaaatggtagtttgggaaaagcttacttacatttaagcattcttttagtcttagaccagggattagcaaactttttctgtagtgaaccagagagtaaatattttatcccctgggggccagactgtgtcacaactattcaactctgccattgtggggtaaaagtgaccacagacaatatgtaaataaatgaatgtggctgtgttctaataaatccttatttatcaatactgaaatccgaatttcacacaactttcacataccataaaacattctttatttttttcaacttttaaaaaacgtaaaaatcattttcagttggctgggcatggtggctcacacctataatcccaacactttgggaggccaaggcagatggatcacctgaggtcaggagtttgagaacagactgaccaacatggtgaaaccccgtctctactaaataatacaaaaaattagccaggtatggtggcgcgtgcctatagtcctggctattctgaaggctgaggcaggagaactgcttgaacctgggaggcggaggttgcagtgagccgagatcacaccattgcactcctgtctgcgagatatcgtctcaaacaaattaaaaaaaatcattttcagcttacaggccatacaaaacaggcagtgggccaaatatggcgaattcatcactgtttgctgacccccattcttatacaaattatgttcagattaggtgtggtttttttagctattttaaactgctaaacaatagctaaatatatccttgtttttattccaatctctctaacagaggtaaattttcaacaaagttgccagacttttaaaaattacgtattctttaatccaaagagcctccataagaatattcaatttatgcaaaaacataacagcacacttgagagagtctgttattatatattcaaaccaacagagcaaatgtaagaaaaaccttggccctaacctgcaggcactccatttgtttggttcacttccatgagaaagacaggtgaccatctattccatcacaagttctgactagggatgtcaaggccattactgtttacttgaatgcaaaagcctatgatctatgtttaatctgcaggataaaataataaactctaggcaacataattttaaaacttctcataaccaaaccttatcaaaaggcctttataaactaaataaatttctaaagaattccacgttcatctattcttctaccaatcattcaaccaatataatccattagaaagcgtgacagttttgtcatgctttgagttttgctcccttgtgacagttcttcccttacagaatcctattttctgaatcttatttcaacatttcacctacagctgcccaaagaatgttataagaaattactccacaaaatccatcactgtatttatcattaaaaaaaaaaaaaaaaagactgtagctggaagcactccccttgaaaagtggcacaagataagaatgcctcctctcactcctattcaaaatagtatggggagtcctggccagaagaatcagggagaaaaaaataaagggcattcaaataggaagaaaggaaacaaaagtaaccctgttggcagacaacatgattctagacctggaaaacctcacagtctcagcccaaaagctccttcagctgataaacaacttcagtaaaatttcaggatacaaaatcactgtacaaaaatcactagcatccctatataccaacaacagccaagatgagagccaaatcagaaatgcaatcccagtcacatctgccacaaaaagagtaaaataactgggaatacagcttaccagaaaggttaaagatctctacaataagaattacaaaacactgctcaaagaaatcagagatgatgcaaaaaaacagaaaaacattccatgctcatggataggaagaatcaatatccttaaaatggccatactgcccaaagcaatttggattcaatgctattcttatcaaactaccaatgacattcttcacagaactaggaaaaactatttttaaatttctatgaaattcaaaaagagcccaaatagccaaggcaatcctaagcaaaaagaacaatgctggaggcatcatgttacctggcttaaacaatactataggactacagttaccaaaacagcatggtactggtactaaaacagacacatagaccaatgaaacagaatagagagcccagaaataaggctgcactgccacaaccatctgatctttgacaaagctcacaaaaacaagcaatggggaaaggactccctattcaataaatggtgctggtataagtggctagtcatatgcagatgactgaaatcggaccccttccttaatacataaacatcaactcaagatggattaaagactgaaatgtaaaacccaaaactataaaaaccctggaagacaacctagacaataccactctggacacagaaatgggcaaaaatttcatgacgaagatgtcaaaagcaatcacaacaaaagcaaaaactgacagatgggatctaattaaactaaagagcatttgcacagccacagaaattatcaacagactaaacagataacctacataatgggagaaaagttttgcaaactatgctgacaaatgtctaatatccagtatctaaaaaaacttaaatttatatataaaaaaaatcctgttaaaaagtgggcaaaggacatgaaaacttttcaaaagaagacatatgtgcagccaacatgcatatgtaaaaaagctcaacatcactgatcattagagaaatgcaaatcaaaaccataatgagataacatctcacaccagtcagaatggctattattaaaaagtcaaaaaataacagatgctggcgaggttgagaaggaaacatttatacactgttgatggaagtgaaaatagttcaaccactgtggaaagcagtggtgattcctcaaagagctacaactaccatccgacccagcaaccccattactggttatatacccagggaatataaatcattctaccataaagacacatatacgcaaatgtccactgcagcactattcacaatagcaaagacatggaatcaacctaaatgcccatcaatgacagactggataaagaaaatgtggtacatatacaccatggaatactgtgcagccataaaaaaagaatgagatcatgtcatctgcaggaacatggatgagctggaggtcattatccttagcacaggaacagaaagccaattactgcctgttctcacctataagtggtagctaaatgatgagaactcatggacacaaagaagggtccaacagacactggggtctacttgagggtggaggctggcaggagcaacaggagcagaaaaagtaactactgggtactaggcttagtatctgagtgacaaaataatctatacagcaaacccttgtgacatgactttacctatttcacaaacctgcacatgtaaccctgaaccaaaaataaaagcttaaaaaaaaagaaatgaaattactcttcaaaacccaacactgtatttactattaaaaaaagattgtatcatgaggtcaggagattgagaccatcctggctaacacagtgaaaccctgtctctactttaaaaaaaaaaaaaaaattagctgggcatggtggcgggcgcctgtagtcccagctacttgggaggctgaggcaggagaatggcgtgaacccgggaggtggagcttgcagtgagccgagatcacgccactgcactccagaccaggggacagagcaagactccatctcaaaaaataaaaaataaaaaaagattactgtaggccagatatggtggctcacacctgtaatcatagcactttggaaagccaaggggaggactgtttgaggttaggagttcgaaataagcctggacaacataccaagatcccctctctacgaatttttttttcttttaattagccaggtgtggtggcacatgcctataaccctagctacttgggaggctggggcaggaggatcgactgaggccagaagtttgaggttgcagtgagccatgatcactccagcctgggtaacaaagcaagaccctgtctcttcattttttaaaaaaagaaagaactcttgggataaatttctcaggtagtgccattgaggaaggaatgcttttctcaagagatttatatggctgtatagcttatagatactatatataccatagctccatataaaattgtcttttatttagctactaggaaacaaaactttcagagtctgcctctggtaacagtgaatgaactgaaagcttatatttacatgtacttctataatcagcttcaaattcctgaaatatttttcctgaattttcttttgaaaaaaaatcctgacatatgttcatgtaagctgtttcaaataaagtgggcataagcattcagtggcgtaacaaactatcacacataggcatcaatcgatcgggaaataatctacctcaaacaactgcaatttgttctttgtgtggcttcaacaaaatcccaggatgccactttagcagctgtcgcttcttcgcatagaccacctgatgaagcagaatacttcctcctaagatttaaagttacaaaattctttaaaattcataaaattttctatcaaacctcaatgtagcattgaaattaattttaaagatcaacattatgagttaaagaaaaatcaaacaaatgactgtttatactttagatatcttctaattataagtaattatcaacatgcaatttttgaacttataaatgaaaatacacacttgttctgtgctctgttcatattgcattcttgccaaactctatccaccacatgatttgctaattttctgggtattttcccaccatggtggctagtactatcggagttgaagccatcagatactgaagaaaatttgacccacttctggacagactgaggatcaactgaaaacaaaacaaaaaaacaggctgtaggagaataaaggtaggtttaaagtaacattatttgggttttttattaatttgtgatacaagctgctccagctatctggtaaaattatttatattttgagataaaaagcatgctactttttggaaccagatctcattaggcaaatgtggcaatcaagtacatctctgtaacctaccactctcagtaccaagagtggggttctcaggagccaggcagggccagcacacggtggcgtgtcgggggaggtgggctgagggcaaggaaggaggtgtcccatggatcatgctgtataagcaaaccagactatcctgatgcccagagtgacatcatcaaggtcagaggctggccagaggtggggagactggaaggacttcggagtagtgcgaaggggccctggacaccagccatggagctgctgcacagagcctggcttccacatcaaggtggggtttggaggccaggatgagcccctgcagcggcagcactctggcccttctgtccctgccagcctctgacctgggtcagtcaatcattgctggattttagccaaacactttagtgttctcatttagttggaaattagacagtcttttttgtaaggtcagctgagcatgagcatatttcccctccattgtaaaaagctcttctgtgtttttatacgtttctcctccattgtaaaaagttcttctgtgtttttgttttaaaggtagatggagggagggcagagatataaactgttgcatgaatcgatgggtcagaactttagtatatgcgtatgttcttctgagtaacagggcgttttgctgaaaataagcaccttggtaactaaaccccttttaatagctaaaacgctttagttctgtattgacagttactgtaaaagcttgggtttatttttgtaggacttaagggctaagaattagaacacagcaatgggctgctctgttggagtaattttaattatagataaacacataaacctttaaaaataaaagcacgctacttttaaatacagaaagcaaaatatctaaaacagggaatgcaaactggatggcagtgtatcaatgctgattttctgactaagaggatcgagtaatagttgtataggagagtgtccttaattctgggaaacacactgagtacacaggagtgatgggacatcatgtctgtaggttgttctcaaatggttcagaaaaagaccaatgataatgaatgtacatcatacagacagggtgatggagtaaataataacagtttggaaatatggctaaggaaattacttgtactacacttgtaaattctcaagaagtttgaaactatttcaaaataaattatttcttaagtacttactgtacacaaaataacaaattaccagagctgatgagacaaattactgctatacctgtttggacttcctcaggagacgtaggtggtgtaagcgtaaccgaagacatagcaggatctcttgtggaagcaggcacttggtggacacccaagcaagaagatgaacagtgagtggatcccacagggctaggagtaggaatgtctgactgagggactagaacaaagcatgctgggtagatcattcggacaccagctgaaaggaaaaaaatgggacaggaaaaccaattacctttgtgactagtgaattagtttcactcaaaagtactataatggaaaagtaggtatcacatttatacaaataaaaatacatttttataaatataagcttctttggcataagtttttcttttcttttttttttttctcttttttagaagaaaccacaataaaccacaataagctgtcagtggtggttatctttgctgagagagatttggaaaaaggcagctttcctttttttagatttctagaaatgtgttttttaaatctttatgtgcacttctgaccaacttaatgtgtattactttttcaattttattgtttaagtttaacaaaggtaatctggacactagaattatgaaccattttctacttacttttctatatgcctctattttaaaagcctaaaaaatgtgtgttttttctgtttctgtcacaactgctctagtagtaatgggtttatttaaagtgagcactggtaatctttttcttaaaaaaaaaacagacaaacaacaacaaaaaaaacaggccaggagtggtagctcacacctgtaatcctagcactttgggaggccgaggcaggtgggtcatttgaagtcaggagttcaagagcaacctggccaacatggctaaaccccatctctactaaaaatacaaaatttagctgggcgtggtggcaggcacctgtaatcccagctacttgggagggtgaggcaggagaactgcttgagcccgggaggtggaggttgcagtgagcagagatcacgccattgcactccagcctgagcagcgacagagcgagattccgtctcaggaaaaaaaaaaaaaaaaaaaagatgaaataaggtgatcttcacgtctaacattaccattagattcccttaaatacaatatggtagattctaattccaattatctcctaaattatactttctccatgcctcctctcatgcctctctgaggtagagtatatgtcttcactccattgtcaggctgtgtgacttgctctggaatgtaagcatgtgatataagccacatcctaacagaagctttaaatgtgcctgcagggtcagtgcagcttctctcacttctgtcttctgctatgagattaacatgtcccagatgtgggtactttgttaacctgggtccctgaatgagaggacatagagaatacagccaatctgaaaaaatctgacccttttaggctgggcacggtggctcacgccagtaatcccagcactctgggaggccaaggtaggtggatcacttgaggtcaggaatttgagaccagcctggccaacacggcaaaaccccatctctactagcattacaaaaattaggtgggcatggtggcatgcgcctgtaatcccagctactctcaagactgaggcacgaaaagcgcttgaacctgggaggcggaggaggttgcagtgagccaagatcgcgccattgcactccagcctgggcaacagagcgagactccacctcaaaaaaataaaaataaattaaataaataataaaaaaatataaaaaaatctgacccttttggcaggcagagcatgccaaagtcataaattctttagttacattttctgtctcttaagttattggaagtggtagttttaccaaatgttaaaacatcatacaacacaggttgtcaacttttcagcctccaaatattaattcattcacaattaactgtcccatcctaagcatgcttccctctagacagaatatatttccctgccccaatgactttggcttggccatttaactagctttgtctaatgcaatgtgagcagatgtaacatacaccatatcccagcagaagctctgagtacacttacatggttaggttcagtccctattattcttctgttctcataagaacagcatgtcctagctactgggatattcatttaacctaggttacagaatgagcagatacatggagccaaaccagctaagatgcagcccttaagtaatgtgggcaggaaattaaggaataaatctttggtgttgaaagccactgagttattagacttgtttgttattcagcaaaatataactaacacatacaatcatgcattttccccttaggaataatactcaggatccataccaacaagaacttctactgcagctaaagaatcatcttcccaatccatatcttcctgtttttcttcagacatctccttcaagcaacatgagataggatagaactgtttccattcaccaattaatttttttgtagctgaatcagacatcttgaatgcctgtcctgtgagagtgccatttagtccaaatgggcataagataactagaaacccaaagcagacatcaaataagtaacaaaagactgttttaccaaataagaacacagtgaaaaatgtggcaaataatcgtgcaattataaaaaagaaaaggaaaccagtaataaccattccagagaaaaatcaacttattatacttcgttactgtgaagataaagtatgacactgagtttattatataaactgttaaaaatttgtctgcccaggctgggcatagtggttcacgcctgtaatcccagcattttgggaggctgaggcgggtggatcacctgaggtcaggagttcaagaccagcctggtcaacatggtgaaaccctgtctctaataaaatacaaaaaaaattagctgggtgtggttgcacacgcctgcaatcccagctactcgggaggctgaggctggagaactgcttgaacccgggaggcagaggctgcagtgagccaagatggcaccactgcactctagcctgggcaacagagggagacttcatctcaaaaaaaaaaaaaaaaaaaattgtctgcccaaactcttaagatttttaacagaagctgggaatatttgtgtatccttcaatttactttgactcccactaagaaaaagcattctaagaaaaagcaatctgaggaaaaacaatatagatatataaatctaaatatttataatgtactgccatgtaaactttaaaaagcaaatattaggtttaaagttaaaataagaacacactgccaagccttagaggcaattcagcaatcttataaaatatttcttctagaattcaacttttttcatagtataaatagtatcaaaagtccctttgtagctatgttacacatggctctggccggacatggtggctcactcacacctataatcccagcactttgggaggccgaggcaggtggaccacttgaggtcaggtgttcaagaccagcctggccaacaagatgaaacccagttctactaaaaaaaatacaaaaattggccaggcttggtggaacgcgcctgtaaccccagctactcaggaggctgaggtaggagaattgcttgaatccgggaggtggaggttgcagtgaaccaagatcatgccactgcacaccagcctgggcgacagagcgaaactccgtctcaaaaaacaaaaacaaaaacaaacaaacaaaatatggcttatatgacctgacatacaagataaccttgaaaacattaacacatataaatccattatgctatctaaaagaacactttaaactacttcaccattcacggtcaagaattttttggtaatacctgtatttaaaaatttatttcactgacttaacactgtaatggggaaggaaaaagtaaatgacatcaaaatcatcattaggctaaagatcagggggaattccatcaatccccaaatgtaaaattatgaagtcaaataaggatctttcaataaaagatcaaatacctaatataataaaataatctaccttgaaatgggctattagactgttgagcaagggtgatatgctcttcactgagaaggtatacaggttgatgttggttaatttccacactggtacaaacattgctgtctccatgcaagaaaaaggtgaaggagcaggacaagtgttcactaaaaaagaagaaaaagttttatcttagtgatgactagtggccaaaaatgttaacttgcttttctttattaggaagtatgcaaaaatgcataccctattttgcccaaaaattctacttcatcagaagaaaaaaaatcatggatatgagcaaagacttagctataagaaatgttctttacaacactgtttatagtaggaaaggctgcaaatacaggaaccagttaaacgagttaggtacattcacacatagaattattatatagccacaaaaataagttaaaatagaagagtaggtttattggaaagggataggctaccaaaatagtagggtcaattttttttttctttttcttttttaaagaaagagagagggtctcagtatgttgcccagggtggcttgtaactcctgggctcaagggatcctctgacctcagcctccaaagcagctgggactacagatgtgggccactgtacccagctcttttttttttttttaaagaaaaaaaaagttttatttggataaagaaaataaaggcggacaacagaattaacagtgacttaatttttatttttgcctattttcccctctatataagaaactataaatgttttctcactttattaattaattggactaatcatttaatgcaatcccctcccaaccaataacattattttaaagcaataatgggtcttacagttgaaggcatcctagaatcaagaatatatgcaaaacagtacaccttaatgaaattcaggtatggctgggtatacaggttggaaaataaaagttcccaaggacatcagaggtatcttcaagatacaatttagaagggtcaagttgcgcagaggaggataagagtgtacactaagaaaataaactctttttattccttctccacacatttatcttaagaattcatccttaaaagttttttaaactatgatattaatcaactcagaacctgttttatatatgtataagccctcttgaatttcttctggataagcagaacatagtgaattaaaattaaattatagtaaaagtaatgctagagttaacagaagtgggaaaatagatggtagaaaagaggcaaaaagcaatacagagctaagaatttctgtatcttatacatatggagtcaatacaaaatgtctaaacttgatagaacaagaaatagaaatttaagcatgttattcaagttacaaatgtaactgacagaggctagtctgaaggtagtgagttacctcagttgactgttcagttagttgcagatcaaactccttgttctactctttcccctctttccactactgcatatgtgactagtctaaaaaatgcttttaatcgaaataaattttttttaggccaggcacagtggctcacatctgtaatcccagcacttggaaggcaggcagatcacttaaggccaagagttcaagaccagcatggccaacatggtgaaacctccatctccctaaaaatacaaaaaattagccaggcgcagtggcaggtgcctgtaatcccagctacttgggaggctgaggcatgcgaatcgcttgaatccacgatgtggaggctgcagtgagccaagatcacaccactgcattacagcatgggcgacagagtaagactgtctcaaaaaacatataagtaaataaaaataaaataaaataaaaattaatgtaactgacagaaaaactaaaaataatataactaaaacaaaaaacaaacaaaaaccttatcattcttgttaagaaagcagtgacaatggctgggagtggtggctcatgcctgtaatcccagcactttgggaggctgaggtgggtggatcacctgaggtcaggagtttgagaccagcctggccaacttggcaaaaccccatctctactaaaaatacaaaaattagccggaggtgcagtggtatgcgcctgtaatcccagctactcaggaggctgaggcatgagaatcgcttgaacccaggagacgcaggttgcagtgagccaagatcacaccactgcactccagcctgggtgacagagcaagactccatctcaaaaaaaaaaaaaaaaagacaaagaggcctgtaatcccagcacttcgggagggcaaggcaggtggatcgtttgagcccagcaatttgagaccagcctggccaacaaggtgaaattctgtttctactaaaaatacaaaaattagctgggtgtggtggcacacacctgtaatcccagttactaaggaggctgaggcaggagaatcacttgaacccagggaggcagagattgcagtgggttgagatcttgccactgcacttcagcctgggcaacagagtgagacttcatctcaaaaaaaaaaaaaaaaaaaaaaaaaaaaaagacacagcggctaggagacctgaattttataaccttttatctactgttcctttaatcagtggagtatagttcttaaaaacacagttttcaactgtttcatttcatacatgaaatattaaataagagaatttaaaaacagccagtcatgcctgttatctcagcacttgggaggctgaggcaagaggagttgggcttgagcccaggggtttgggaccagcctaggcagcataagaccccatctccacaaaaaaattaaaaattagctaggtggggtgtggtgcatgcctgtggtcccagctactcgagaggctgaggctgaggtagaaggaacatctgagcctgagaggttgagggtgcagtgagctatgatgacaccactgccctccagtctccaaacaaaaaaagatatttaaaatggatttttctcatgacaaagcattttaaaataattttaaaaattattttaaaaacattttaaaagattttaaaaattattttaaaagcatttttaacattttaaaaatctattttcctgaaaatattataatatgggaaatgtttaaatatacattaatttgacctatcttaaatattatttaggaaaataagtttactctagtatgtataaaatcataaaagtcatctttcaagttccctaacagtctttccaatgagcacttacccacttcattttttaattttatggtttagagacaggttctcactggagtgcagtgatacaatcgtagcttgctgcagcctcaaactactggactcaagaaatcctcccatctcaccctcttgagtagctgggactacaggtgtgcgctaccacacccagctaattttttttttccccctagggatggcaggggcgggggggctcactatgttgcccaggctggcctcaaactcttggcctcaagcaatccctccaccttggcctcccaaagtgctgagattacaagcataagctaacctcatctggccccattttatctgttaaataagaaaataaaatttggcttcttgatataaagggataaattggtctccaaggagtctttgtagcaatccagtattccaaagtacaaaacatgtaaccaatggtctcagctcccactgtttatctgccactaccctatttactaacaacactcaatcccagcagtctatgatcaaagaatcactacctcctatactgctagcatgtaatcccaatatacaatagtctgatcttattgtaacattcagtggtttaaaataaaccaagtttgtatgtgatactggagggaaacaatattctaaatatgtgatacaagtttcttgctctgttgcccaagatggagtgcagtggtgcgaccttggctcactgcagcctccacttcccaggttaaagcgattcttcttcctctgcctcctgagtagctgggattacaggcacccatgaccatgcccagctaatttttgtatttttagtagagacagggttttaccatgttggccaggctggtctcaaactcctgacctcaagtgatctgcctacctcggcctcccaaagtgctataaattacaggcatgaaccaccgcacccagccaagatttttttttttttttttttttttgagacagtttcactcttgtcaccaaggttggagtgcaatggcgtgatcttggctcactgcaaactccgcctcccgggttcaagcaattctcttgcctcagcctcccaagtagctgggatgacaggcgcctgccactgcgtccggctagttttttttgtattcttttagtagagacggggttttgccatgtattggccagactggtcttgaacacctaacctcaggtgatccgcccaccttggcatcccaaagtgctggaattacaggcgtgagccactgtgccggcctgaaattttttttaagagatggcagtctccctatgttacccaggatggagtgcagtggctattcacaggcacagtcgcggagcactacagcctcaaactcccaacctcaagtgatcctcctgccgcagcctcttaagtagcttgaactacaggtgtgcaccaccacacccaaatctccgaaatccttatattaaaggcaatattctagtcagagaatattataaaacaattagaaaatactaacatagtaaattcagacttgctttttttccaaggagaaatgttatttgtatcatcccatcaaacatttttggtatttaacactcagaaaagtgagttaaaacaaaaacatgtcaccacaataacaattcgaagtattattagttactataaaggattgcagagaatactgttgctctccatgagctcacactacaatatctaaaacaaaaagttatgaatgaggcagaattttataaatgaaacttgaacaatcttccatcgtggaaaaaaaagttcctcaaattaagtactgaaattaatcaaaagattatttctaaaacagaaaatgaagacgtgcttatagattaaagctggctgctctaacagcaacaattccatatgtatgctagattaggcagtgccacatcaaacctatttctagcatttgtattaagcagctacagaaaaatgatatcccatttgccagtagagaatccgaggcacaaagaggttaaatggcttgtgttaaaatcataatactagtaaagagaatgctgacttcaaactctaaacaccctatcaaccaattaaaaaaatgggcaaaagacttcaaaagtcgtttctccaaaaatgatataaaaatggccgataaacacataacatgctcaacacatcactaatcattagggaaatgcaaaccaaaaacacagtaagataccacctcacacccataaaaatagctttaaaaaaaacaggaaataacaagtgttgatgaggatgtggagaaaatggcactcctctgcattgcctttgggaatgtaaaatagtgcagccaccatggaaagcagtatggaaattcctccaaaaattgtacttcaaattaccatatgatccagcaattccacttctgggtagacacccaaaggaacttaaagcagggacttgatgagagatatgcagaccaatgttcatagcagcattattcacaatagccaaaaggtgaaaacaacccaaataccatttacagattaatacataaacaaaatgtagtatatacatacaacggaatactattcagccttaaaaataaggggaattctatcacatgcttcataaatgaatcttgaagattttatgcttactgaaataacccagacaaaaaaggacaaatactacatgattccactcatatgaggtacctgcaatagtcaagtttctagacagacaaagtagaatggtggttatctgaagcagaagaaaagaaaagaaaaattgaagagctgccactcataaaattttatgagtacacattcagtttgggatgatgaaaaagttctgcagatagatagtggtgatggttaacaatgtgaatgtacttaatgccactgaactgtacactgaaaaattattaagttttgttacgtacattttaccacaataaaaagaaactgtagtcatctttttttttttcctttgagacagggccttgctctgtcactcaggctggagtgcagtggcatgatcagaattcactgcagcttccacctcctgagctcaagcgattttcctgcctcagccaacgaagttaggtgggactacaggtgtgagccactatgtccagataatttttagaatttattttttgtagagatgaggtctcactatgttgtccaggctggtcttgaactcctgagcttaagcaatcctcctgtcttggcctcccaaagtgcagggattacaagcatgagccactgtgcccagcctcccctagccatcttaattctgagattatttttattccgtgaattcaaaagtttccaaacttgtcttacattaggatcttctaaaatttccaaagcccagattacagtcccaggttaagacacaggcatcaataattttttgtaagctctccaggtgattcccacatccagacaagtttgggaatcattaatctgtatttctacagccttcagagtaacttttaaatttttaaatttacaggtataataccagtatcaggtattattaacatagctccatgaacaaaagatctatactaaaatccagaagttaacatcttacctgtgaatcctgtacatatttctgctcactcagtgaacatattacttacattatacagtaaataatacttagaaagtggccaggcacgggggctgatgcctgtaatcccaacactttgggaggccaaggcgggtggatcatgaggtcaagaaatcaagaccatcctggctaacacggtgaaaccccgactctactaaaaacataaaaattagctgggcatggtggcacacgcctgtagtcccagctactcgggaggctgaggcaggagaatcgcttgaacctgggaggtggcagttgcaatgagccgagattgcgccactgcactccagcctggtgacagagcaaggtttcatctcaaaaaaaaaaaaaaaaaaaaccaaaaaaaccccacaaaacttagcaacaacattattctggtttaccacttcaagtgttctgcaaaatgctgctttttattgttgtttttaagtattatggtttttactatttcctgtaacttaaaaaaaatacatgtgtaggagacatatcggtctataggggtccataatctacctcatatttttcatgcctaaaatgcagctccaacacttgatagctgtatgagcttggacagatttgtaagagtctacagtaagaattatagaaagaaattacggtaagaaaggctgggcatggtggctcacacctgtaatcccagtactttgagaggctgaggctggaggatcacttgaggctaggagttagagaccagcctggtcaacatggccagcagagaaaccccatctctacctaaattacaaaacttagtcaggtgtggtggtgtactcctaagtcctgagtatttgggaggctgaggcaggagaattgtttgcgcccaggaggcagaggttggagtgagtcaagattacaccactgtactctggcctaggagacaaagcaagaccctgtctccaaaaaaaaaaaaaaaaaaaaaaaaaaaagaaagaaagaaagaaagaaaaattattgtaagaaaacctcaacaaggaggaaaaataggagaagtcttagcatttttctcataaacgttctagaaagcatgaaaatgtagaaaattgaccatgcaaattctagtgacatcatcatttaagatttcagaaatgatacataataatcttgatgacagacattaaggacaaaacattatagacaggctacagggaaaacaataaaaaggcacatccagtctgctgaagtaactacacctaatttagcagagagttcataccctgactgatacaaggtacgggattcttcttgcctttgagattctaaagcatactcacaatttagcatacaattccagaagggttcactgaccaccagagaaggtacctttcactaataaacactaccaagttcaactgggcttaaacccctagaactgtgttgtaaatacaatagccaatacacacatataactattggtgacttaaaatgtggccaatccaaactgagatatactctaagcacagcacacacacctaatttcaaaagcagtacaaaaagtaaactatttcattaaaaccttctgcatagttaattatatgctgacatgatattattttggacttactgaattaaaaaatatattacaattaattttgcctatacatttagtttttttttagctttttaaatgtgcctagtagaaaattttaaattacctatgtggctcacattatacttctactggacagtacattagatgacaggaagagaggaaatgagtccataaaaaacctaacagcaatagctcctagcttctctagaaatttgccttttcggagacagtgagaaacctaaccaaaggacatcctaacgctactaatggttaataatacattttcaggggagacttacatctcatggtgcctatttttaatcagttttggagagcacgagataatgtaaaagccatacatatggcagaaaataaacacagctttatgggtgaaatttaaagcatattctttcatttacttccttaaaaaaaaaaaatcgatgaatttctttattgaagcaccaaaagtactgttttaattataaatataaaggttcttgtgtaagcaataccacccaaaaaaataactttctgcaatgatgaaaatgttctacatctacactgcccaatacaatggccattaacaacagccatcctttccttcctgtgaacttttactgctttatcccacaaaatcaaaaatttatcactctctatggactaagttttttactactaattccagggctctaattattctaatacaaaggcttagaacatattgaaccaaatatttaatcctattttctttatgttatatccagcaaggatttattatatcctatatgtacatgtctatatgtatacacataatgtaatatagacatacaaacacacatatataacatgtaatactctatattgccttttttgagatggagtttcactcttgtcacccaggctggagtgcagtggcacgatctctgctcactgcaacctccacctcccgggttaagtgattctcctgcctcagcctcccaagtagctggaattacaggcacatgccaccatacctggctcatttttgtacttttagtagagacagggtttcaccatgttggccaggctagtctcgaactcctgacctcaagtgatctgcctgccttggcctcccaaagtgctgggattacaggcatgagccaccacatctggcctatattgccttttaaaattggaattaaagataactattttacatacagtaaatatatcaaaaaagatttaacaacatattttttccatagaaatcaattatatatagttgagggaatggggtaagattaaagtatgtattaaaatcaaacatgttccctattaactatttccctcctatacacaatctcatctgccacttaacaaaacctcctatgtcactatatacgtaagatactgaactagctgtctaaaaaaagaattctttactagtatgtttctattctgtataccctcctagaagcatttaaaacttttgctaaatacacaaactttaccgcacactcagctaaatggctacaacagattcaacatgacaaaaagcttaaccaaacacaatcttaagaaagttcttggccaggcgtggttggtgtgtgcctgtagtcccagctactctggaggctgaggtgggagaaccaattaggcccagaagtttgtggctgcaatgagttatgattgcgctactgccatccatcttgggcacagagcaagaccctgtctctatttaaaaaaaaaaaaagttcttattcaagataatctttttcaaatgcactctcaaacatggcaagttcagaatatcttttatagaagagactaaaacctacattaagtcagtggtacttactacaacccatttgcttgtgggctcactagaaaactcaatgcctgtcatgtgatccagtccccagcaatgtaggaaaacacctaaactattcaagaaaacactggtcatcattctttaaaccaattatctgaagactggtttgttcctgtggttactcttacacttgcgggattctttacaggtaacctagctgtatccctagaatttgattctatttcctctctttcagtccctaaagactgttaaacacacaactacatgtaggtccagattatcagaaaatgagatttttttctttaaaaattttaaagaaaggaaaaagaagataaaaaggtaagcaatattattttctcctttgttcaggtcaaagtagtttcacatcataaattttctttctttacaactcttgttcttttttcagaatacttataccaaaagtgaattgattagtcaacaaaaacagtctatataatacttatgtttcagaatggtctagaaatgcattaatttataatcaatctttatctaccttccctatatcattccactgaattcaacagaaaagaagtccgaagtaataacttaaagatagacttagctgcttgatttttgtcctacttgcttttccaaagaaggaaaaagggtaagaaagttcctgtaaaaaagagatttgaggagcagcatttatctttccagaataaagtcagttattataccacaactatggttcaagagtaactcgaaagagcatatactatttctggtaacacttcactaataaaatacaatcttaatttagttcccctcctaaatgggtcagcccatggaaaaacactagtgctcaattacatggttaaataacaagcagcatctgttggattcatgaaaatatccaattaaaagttgtatttttggccaggtacactggctcatgcctgtaatcctagcactttgcgaggccaaagatggtgggtagcttgagctcagttcaagaccagcctaggcaacatggtgatatcttgtctctacaaaatctacaaaaattaaccagccttggtagcgtgcacctgtggtcccagctacatgggaggctgaggtgtgaggactacttgagcctggcagtttgggctgcaatgagccatgattgtgccactgcactccagcctgggtgacaaaataagagaccttatctcaaaaaaaaaaagttataatttcaattttttttttttaagacagggtcttgctctgttgcccaggctggagtacaacagcacaatcctaactcaatgcagcctcaatcttctgagctcaagtgatcctcccacctcagtcttcagagtagctgggactctgaagtcccacttcagagtgtgtgccactgtgcccagcttttttttttttttaaagagacgggggtctgcagccataaaaaaagaatgagttcggctgggcatggtggctcacgcctgtaatcccaggcctttgggaggccgacatgggcggattacctgaggtcaggagttcgagaccagtctggctaacatggtgaaaccccgtctctactaaaaatacaaaaattagccgggcgtgctggtgggtgcctataatcccagctactcgggaggctaaggcaggagaattgcttgaatccaggaggtggaggttgcagtgagctgaaatcatgccactgtactccaccctgggcgatagagcaagacttcatctcaaaaacaaaaagaatgagtttatgtcctttgcagggacatggatgaagctggaaaccatcatcctcagcaaactaacacaagaacagaaaaccaaacactgtatgttctcactcaaaagtgggagttgaacagtgagaacacatggacacagggaggggaacatcacagactggggcctgttaggggatagggagcatggagagggagagcataaggacaaatacctaatgcatatggggcttaaaacccagatgacgggctgataggtgcagcaaaccaccacggcacttatgtatctattaacaaacctgcacgttctgcacatgtattgcagaacttaaagtaaaaataaacaaacaaataaataaataaaataagatcattaaaaaagagagagagagagagagacgggggtctagctatgtttcccaggctgctctcaaactcctggtctcaagccatcctcccacctcggccccttagtggtggattacaggtgtgagcctatattttcaattatcaatagccttttaagagtttttcataaagaaagccgggtgcagtggttaaacttacaaagttataaactgagtcaaaccacagaatcccagaaaggctcagaagttgaaggtactggtatatatacatatatacatatacatatacatatacatatatatatatatatatatgtatatatgtatatatatatccctgaaggtggatatataggtgtaactgaaaagagaaggggctggacacagtggctcacacctgtaatcccagcactttgggaggctgaggtgggcagaacacttgaggccaggagatcaagaccagcctagccaacatggcgaaaccccgtctccttaaaaatacaaaaattagccagtcgtggtggctagtgtctgtggtcccagctacttgggaggctgaggcatgagaaccgcttgaacctgggaggtggaggttgaagtgagccaagattgcaccactgtactccagcctgacagagtgagactgtttcaaaaaaaaaaaaaaaaaaaaaaaaggaaagaaaaagaaagcagaaggaatgaaagttcaaagatattagagcctctccactttcttccagatcagtgaaaaacttaagaggtccactctttgaaatggttgaaacagagggactcagaattagagatattcagatacagctgagatgatgtatttaaaagattaagtgaaaatttaaccactatgtaagtgagccccacctccaaacctcctttccccaataggttcactaaacactggcagcccagcttataccctctagtcagagtactgaaagtctcctctgggaaaactacttaagcaggtgacagagcgtacaaatactggcaggtgggtgacaggcacccaataaaaagagtcaagtccccagatcattcactctagtaaagcctgcaatgtcataagctactcacatacacagaacctccagttagcattttagtacccagaagtctaagagggttgctaatcaaagattctatacccagtcaaaactatcaattataaggatagaaaagaaagaaacttaagagcctgcaattctgcggtttgactcagaattccaacacagaggatctcaaaagtatcaccatccttgcactctcaggaaactactctcaggttgggcaccaccataacagtaaataagacaaaaaaaaaaaaaaaaaggagaaatgagaaatgagggatccaacaagaagggaaaagcaaagagaatccccaagatgactactgtgaaacaggactacagaactactaatccaaatcggaaaagaagaatgaagggtaacaacagggatattaattaacaagaggagaaaaaaagggaaactcataagattatacaaagtccttgaaggtagggagaagtgatttatacttctaatagatagtctactgatgaactaccaacaggtacacagatcaggagtcagcaaactacaaaaagtcagctagaaaatatttcaggctaagtattttcagctttgcaagccatctgtctctatcataactatttaactctgctctagtgtgaaagcaggcataaaacaatctatcaatgaatgagcatggctgtgttacaacaaaactttatttacaaaaaaagtggcagagtacaggcaggtgtttactaactcataacattaataattaagtgaaaaaaagggataatcattaacacctgggaaaacaaaacgatgtacaagaaatgaaatgtgaaggctgggcgccgtggctcacgcctgtaatcccagcacttggggaggccgaggtgggcggatcacaaggtcaggagatcgagaccatcctggctacatggtgaaaccccatctctactaaaaatacaaaaaattagctgggcgtggtggcgggcacctgtagtcccagctactcgggaggctgaggcaggagaatggcgtgaaccagggaggcagagcttgcagtgagctgagatcgcgccactgcactccagcctgggtgacagagtgaggctctgtctccaaaaaaaaaaaaagaatgaaatgaaatgtgtttcaatatactatggctcagttacaaataatatttataaaattataagagtataaacaaatattgtttttaccaaaacttataactatattggcaagataaggaaagggagaggaagccaggtgcagcggctcatgcctgtaatcccagcactttgggaggtcaaggtgagtggatcacttgaggtcaagagttcaagaccagcctagccaacatggcgaaacctgtctctactaaaaacacaaaaattagctgggtatgatggcagacgcctgtaatcccagctactcaggaggctgaggcaggagaatcacttgaacctgggaggcagaggttgcagtgagccgagatcataccattgcgctccagcctgggcaacaagagtgaaactccgtatcagaaaaaaaaaaaaaaggaaaaggagagggaaaagaagtgtgtgcaaaagtgccaatatccaagtgttgagtcgggggaagtaagatagctaacctctcaatagaaagtcaatagaatttcaatggtaggctgttgtgaccaaaaaaaaaaaaagtccactagattaatcctaaatgataactcaagaataagcatgttatgtctttcaaaatttttaaacaggtaacttaaaagaaacagaagaattaaaaagggctgcttctgaggagcaaatctattcattggggctcaggattgcagcctttcattttaaatcttggtaatctgtttgacttcttaaaactacataaatctatatgcctggctgggagcagtggctcacgcctgtaatcccagcactttaggaggccgaggcgggtggattgcctgagctcaggagttcaagacaagcctgggcaacatggcaaaaccccgtttctactaaaaatacacaaaattagccaggtgtggtggcacacgcctataatcccagctacttgggagactgaggcaggagaatcacttgaacctgggaagcagaggttgcagtgagctgagattgcaccactgcactccagcctgggcaacagagtgagactttgtctcaaaataaataaataaatgtatatggcagatattgttaactgcctacccaatatccatttccacttctttgatctttggtatctatctaatatctatcagccctttcttcttactaacaaaaacttcatttgttcagagcagctgtttccaaataaaagatatttgtttctcttagtatggccaaagatatgtcaactaaagtttccagaaaataatttactttctgactcaggtgccacaccttccttacttcctcccttcctttctcttcctgcctggaatccactgtgaggtctggaggtgcaacacacgggaggaccatgaagatgtaaaaatggcacagagaaaactctggggaactttgaatccttgatgacattattgaacagctataccagtactaaactatcgacctccatactgcttgctactgagaaaaatcaatccctacataagccaagtagttaatgttgttctgtcatttccagctgaatgcattctgaacttacacaagtattttgttaacaataaaggtttacgttaattttcaaagaggaaaaaaaatgaaagcacctttatttatccaggcttatctactcatccagtcttactaaaactaaaaagtttgaaaaaacaaacaaacaaaaactccaggtgcacatgaaaaaagatgtgcatatatgacatcaaagacctcaaaatgattacaatctcaaccaaatgttcacttcacatcctctcacatctttcaggaaaaattagtaagttccctttagttttctcttccccacatcccaacttacttgccactggttcatctctcttgaagtctcactaactcaatgactgctgggaacttaaatcttttgagagactatgccttatattatctaaatcacggagaagcgagtaacctgaaggttttaattgcataggagaaggaggtatctatcataagtcttctgtgcctctatctgcaactagtctaataagtagtgtcataaatttgcttaattcattgctcaagaaaattataagctctcaaagagtaaatggtcttatatagaaaacacaaatttaaattactttaattaaagggaattgagagattgggaataagaagggttaacttgatccaaaacatactcacagatcactatccttaacaggtgttgttacttaattttaatatcagagtgctgtgcatatatttccacaaatactaaaaaaaagatacttccaagcctaagtctctgctttcatcccacattaagtctatcatcacaaatcaaaatttaggccactgtattaaaatacagcctattcctacagtaagaaaatgcttaaagtgtataaagggaagtttgtaaagtggtttaaaaaaaaaaaaaacctgactgtatctagtactctgtcactgacaacctctggaatatgtctgtatattagcttgttttatcccacattctctgttaagacacaaaaaggaacaaatctaaagaaatatcacgtcagaatttaagatagcttaccttttatttataggtttttcatctttttcataaggctttacaaaccacttgccaatacgtacaaaattcctgttcattaaacaccgttccaatagattgtgaactgctttgaaaagcagagtacggcattcataggaaagtccattctcccacactccatcttcttcttctaaaagagaaatgaaggaaataataaaatagtgacactataatctattcagagccaagtaaaaaaggttacagtttaaactctatattcatcaacactagcttaccccagaatattaagctacaatcacttcaatgtatctctagacattatcaggtttcaaagttactccacaaggaataaaaggtctaagtgccacatattctattaaattacctgaaaagtatttttccaccttataaaattcaatgacatcatgaacatactgaattggttcctgtattaatgaaaaggacacttgtttgtataacctggaaaatattaaacacactctacacctatgatgccaatttctaagctggctcacttgttactttgtcctaattcccctagtcattcaacctgccaaaaaaactagccagttaataattaaagtcaaaacatttcatgtccatcagcattctaatccacgactccactacaacactaagtgatgaataaaaaggaagctgttggcacagagcctaacaagcggtgcactatcagccaccttaggtctcatttcaaacaaattattcccatgattattattcagtacaggaccctttacttgggggagaaatttaaaaatttaaagacttaaattgtaaatggcacttctgtcaaataaaattatagctatcttcactaactatatagcttcaattttgccaacaaatctattaatcactccaagttaatttaccaaaaaaacattaacacagtcattttgagataagtctggatgtaggtcagaaaaatttttttgtgtactctatccatttcatatctgtcacaaagcatccaacaaatcgtgctacaaataatgataccacttcagcactctaactttcattacaagattttaaattgcttagtctaaatataattaactctccttctatagcctatatacctttataaacattttgtaaatatgggtcatctgtgttcaatgtttaagtaaaaataaaagacaaacgtttctcaattcaacaccaaaaatgcatacactatacccacagaaaaacagacacaatatgagcttctgaataaaagcaaagacatgtattaagagttacacatggtttatatgcacaatttatacaacaaatgggtagaataaacattaactaaaaagtatgatagtggactttaactgcactagaaattctgtgccactacaaagattaatgttggttttatattttctcctaaatgatagtcaagtctttcaaagcaactaatttttttttaaattttattttaaataagctttaggctgggcgcagttactcacgcctgtaatcctagcactttgggaggctgaggtgggcggatcacctgaggtcaggagttcaagaccagcctcgccaacatgatgaaagcccatctctactaaaaatacaaaaattagccaggcgtcatagtgcagccctgtaatcccagctactcgggaggctgaggtgggagaatcacccaagagggagagattacagtgagccaagatcgtgccactgcactccagcctgggacagagtgagattcagtctccaaaaaaacaaacaaacaaaaaaaaaggtaagcttagggaaaaaaaagtagaataagcttgagaaaatgacaatatttcagaattggtatagaataattttttaagtctaatattaatcataaatattaaataggaaaaattcacattctattatatcaaagacaccgttatctacttccatttaaaaccaaaacgtttatgggtttcacttcattaaagaaagtattaggctaggagaatagagaagcagcacaaagtgacttcactttaattaattaaaggtctagatcacaagcatatttgtgagttgatgacaaaaaaagagaaaagaatctcaattgatctgctttcaatttaatgaggtcctaccatttcaaaattaaatagctacattaagacttttacctcaaattatgagacttatgactactagaatatacatgttcttaattccaacagaattatgttaggaatatcttccaattcttcacctctttacaatcaatttagtatcttttatttttattaccttttatttcaaaaatccctaccttctgatggttgtaacacttgttctacataagaaaccactaccaacatatttctcctaagttttaaagcatcaaagacccaagacacagttaccatttgtaagtatcaaggttgtacagttgttataaacttcaaataaattagtcatttaaaactagaaaatgactttgtctccttcgcaaaaatagtaaataaaaaaatctgctttctgggaggctgaagccaggtgtggtggctcacgcctgctatccgggaggctgaggccaggtgtggtggctcatgcctgtaatcccagcacttcaggaggccaaggcaagtggaccacttgaggccaggagttcgagaccagcctggccaacatggcaaaaccccatttctactaaaaatataaaaattagccatgcatggcacggctgtagtcccagctactcaggaggctgaggcatgagaatcacctgagcccaagagatgggagttgcagtgagctgagatcacaccactgcactccactgtgggcgacatagcgagactctgactcaaaaaaacaaaaaaaaaaacctttgcaatagtaaaagctaaagcacaatttataaattttcacatgaaattctgaaaattttatggttttattttgtaaaatctattttagttaaacttgcagtcaaatgatttaagaatatttaatgtgaggccatgtgcggtggctcatgcctataatcccagcactttgggaggtcgaggcaggtggatcatctgaggtcaggagttcaagaccagcctggccaacatagtgaaaccccatctctactaaaaatacaaaacttagctgggcgagatggcatgcacctgtagtcccagctatccgggaggctgaggcaggagaatcacttgaactgggtggcagaggctgcagtaaaccgagatcacgccactgcactccagcctggtgacagagcaagactccatctcaaaaaaaaaaagaatattgaatgtggtttagaaaagtaatcagtattaatcttgaagcatttctccctcattattctaatgctttcagagggggtgggcatcttatgtccccagtgcccacaattctcattaacactaaataggagctatgcataaaacaaacaagtagagaccacctgttgaggttttctaaatccaacgtatctctgaagtatgtcctcatctatatggcaagcaactaagcaaccattacactaaagtaatataatttcatattttgttgctgagaaaaacgagagtaagtcctaataacgctcaataaagtctgaaggtttttggttttgttgggaatcacttagaaacaagaagcctactgagccaagtttctaatatcctgacaatctaataactgtaataaaagtactttctacacgttgtattcagatacgaaaagtgaaatggtacaaccaacccactcaaggcatagtgatatgcactatttacactaattgaaacaagttcttgaatctcaacaccagcattataatagggaggggaaggagaagggaacatatggcaaatctttacctatctcttttgaacttaaccagagcctaatagaaaaagtctgcttaatctatataactattttcctcctctagccaggtgcaatgactcatgcctgtaatcccagctacttgggaagctaagacagaaggatcacttgaagctaggagttcaagactagcctggcaatacaggaagaccctgactccaaaaaactttttttagttagtagggcatagtggcaatgcctgtaggcccagctgctggggaagctgaggtgggaggattgcttgagtccaggagtcggaggctgcagtgagctatgattaagcactgcaggctgagtgagacaaagtgtgacctccatccctacaaaaaaaagaaaaaaaaattccttctcttgtagctctatgtccagagaaaataaagttcaactctgcattcttagtacttttctgttactattagcattacagttcttaatcatcagtgtttcttgaaatttttatggactatttattggaagaaaacacaaatgctaaatttgattaccatatttttttcctgaagatgcagattacagtagtgccaaagtatgtgataagtcatcaaaataattctctatcaatggggaaaaaaaatcacaaccaaaaaagcagacacaccctgcactcaacatttttctcaaaaaaatggcatctttaaatatctccacggtggtaaaaaatgaatcttctccaatacaattttgcaaaactattaaaatgtaacatatgctaatgaataatggctcaaaaattaacatggtagaaaataccatgtatttcctgaaataaagagaaatgtttaaatgctagatcagtgtttctcctgaataatcattaataacctatacattcaacaaatataccgagagccttaagttggccgcatcattatctatggcaaaacttgaaaactgatttaaaaacagcctagtatgttatgtttggcttgaaaacttagaagatacacttgatcaaaaaaacagtatgcagaagaaatacagcaaatgaagttgtcacctaggagactagccaatttaaagagtcgggccacatcacaagtaaattttacaatagtagaaataaattactctctttagactatgtggggcacacaacaatgttttagtttggctgggactagattcctatgcctggctgtttatctatctgtcaatcctattaacagctgtcatttaaggttaaagtccactacagttaatatccttcaattaaaacatccaaaattaaattcagaacaatagtccacttagtttgagcactattcattatgataaaattctggtataataaaactatctgaacatgttactaaaatctactttacagacctcaggagccaggaaaaagaacaaatatttttagccctgagtttttttagttcacaaggtatcagttttctcaaagagtctcatcacagtctaacttgctatgatttttttaagatgacaaatgggagaggacgcagtgtttgcttttatttttatttaaagggaaagaataaaagccaatgatgacagcaattgaattccaaaaatgttagaacacagaataaaaatacacagaaaactctccttcaagaccacattaatgaaaatgatacaatcttgctctgaagcaaattaacagtacacttaaaagtaccagtcctacccaccacagagattcttgaccagagggactgagctaagattttcccatcacccattttatacctctttcacccactatcacacaaccactaaacaaagctacaaaatacaatttttaaaaaaaaggggccaggcatggtggctcatgcctgtaatcccagcacttggggaggctgaggcgggcagatcacctgaggccaggagttccagaccagcctggccaacatggcgaaactcctattaaaatctctaccaaaaatacaaaaattagccaggcgtgatgacacatgcctgtagtcccaactactcgggaggctgaggcagaaggatcgcttgaacctgggaggcggaggtcgcagtgagccaagatcgccccactacactccagcctgggagacagagcgagacttcatctcaaaaaaaaaaaaaaaaaaaaaagaaagaaagaaagaaaaaagctgtaaccccaaaggagttttattccctaatcctttttgtatcaaaacatatcgaccccgattcaactaatcattatcctatagaggataaagcaaaaagtaagaaaatcatctatgtttggctttggaattcaagagattttttgaacaaataaccttctggaatgttatagtttggctaatactagttagcacaaatcctgatccaaaaatcatccagcctttgcaaattactttgctcaacggtattgacttactgctacaaaatgagtaactgagggtttaaagtatgtattaaatcagacgtgatttgctgtaactgatctttgccagttagcaataaaataagtttacattctatttctacacatcagctaaacttgaaaggaaggtaacccaaacaaatgctaagtgacataagagaaaatgaaatttaaaatgcactatggaatctgaacagattcttcagaactgtcgaaatcatcaaaaccaaagaaagtctgagaaactgtcacagtctaacaaagcctaaggagacatgacaattaaatgtaataggggtatcttaaatgagatcctagaaaagaaaaacatattaggcaaaaaaataaaggaaatccaaatatatactttagttaataataaagtatcaatattggttcattagttaatttttaaaaatacactgcatgacacaaaggagctaagggggttaaacaaaggcaattctgtatttctgttactgaatattccagttaagaaaaactgagaattctaatctttgaaaaaagaaatgctttccctcttccctcactaccaagaaaaacaagggcaatattatcaccataataaaaaacacttcagtaacaagatgtggtgtgtgctgaaccaaacagaaggacactgcctgtgaagagcaggctcaagctaaattaaccagctttttagttaccacctgggtccttccggtaccccattcctcagtgctacacctccacttggaactcaggactgcctccagcagctgatgctaccctgtactgtccagctgctctcttctcaggggagcttagaagaaggaaatagagtgccacagatggaagaaatgaaaaaggggttagctagagagacagaggcagactaattaccccaagagggaggtagacgctgtccctagagcaaagaaaagggcaagacaaatatattccatctgaaaaaaccttattatgctttaagatacgtctgatttaagtaacaacattcttaagtaaataacaggttttatttttaagaaaagctaaaatattatataaataacactgactatgcaaactaaaacagtacaggacaagctttggaacaataaatatgatcatataccactcctaattgtatttcagtttattatttcaatcacttcactttgataaatttttaagttatttacggccaggtgcagtgactcacgcctgtaatcctagcactttgggaggccgaggcgggtggactgtctgcgctcaggagttcgagaccagcctggcgaacacggtgaaaccccatctctactaaaaatacaaaaaattagccgagtgtggcagcatgtgcctgtaatcccagctactcgggaggctgagacaggagaatcgcttgaacccaggaggtggaggttgcagtgagctgagattgcgccactgcactccagcctgggcgacaaagcaagactccatctcaaaaaaaaagctatttaccattcattagcattcagtaaagtctgacagcagttaaaaccctacctcctgcctgtaatcccagcagtttgggaggccaaggctggcggatcacaagctcaggagatcgagaccatcctgtctaacagtgaaaccccgtctctattaaaaatacaaaaaattagccgggcgtggtggtgggcgcctgtagtcccaggtactcaggaggctgaggtagtaggagtatggcatgaacccaggaggcagagcttgcagcaagcaagctccactgcactcagagagcgagatcacgccactgcactccagcccgcgggacagaatgagactccgtctcaaaaaaaaaaaaaaaaccaacctcccaaaattattttcattcacgttcaagatcactatctatttttttttttgagacagagtctcactctgtcgcccaggctggagtgcagtggcaagatctcggctcactgcaacctccgcctcctgggatcaagcaattctcctgcctcagcctactgagtagctggaactacaggtgcgtgccaccatgcccagctaatttttgtgtcttcagtagagatggggtttcaccatgttggccaggatggtctctatctcctgaccctgcgatctgcctgcctcagcctcccaaaagtgctgggattacaggcgtgagtgagccatggcacccagctgatcactattttaaaggtacaagtaactaccatttttgaaaattacgctaaaaatcaaagctagagaaaaatgtttaagactgtaacctagtttcagtggagaaaacatatctgactggtaacatgaaacctagaagacaaaactgacttttaacaatatccatcaaagcagctcacatctaactttaatagtcttttaactttcacaatattttttctattacggtaaaactaggccaggtgcaggggctcacacttgtaatcccagcactttgggaggttaagatggaaggatcactagagttcaggagttcaagaccagcctggtcaacacagcaagaccccatctctacttaaaaagaaaaaaagaaaaaaaaaattaaacattatgtatctcttaaaattatctttgattctacaaagtgtatttcatggaatcttaaaaaaagatctgtttagtctgtttagatgctctgccaactttattaagaagaccaaagcccctaagtcaccattatagttttatcaataattatgttttatcaacaaatatattttatcaatagtttatagtttttcaacaatgttatacagtctccaaacattctagtaaggtgatttttatgaccacttaacgattaaaataactcaaatactatatccaaaacaatgaaagaaaaaggaggctggcggacttagcttttggcataattagaaagtattgtctcgctaaaactaccatatatacatacatcatgtatatgtacatatatgtatatacatatacacatcactttacacatttagaactacattaaatacacacaactaaggactggactctgcagcaggcatcttattagaaaaactacaaaagctggaaagctttcttgaagaattgcagtcactctcaaaaataacaattaacactggagagtatgttcattagaatgtgaaaagcaattatcaaaacatacaaatgtaacacgtacattcctacataaatgttggtcttactaagtaccagttcaagatacagacacctagaatacattctatccaaaaataaaatagatcctataggtcagagatacaataacaaaaacttcagagtactcaatttcaaataagaacttaaaaaaaattatctagaaatcctaagtttatctgtcaaaaatcattatcaaactatcttactgaagtctttggaaccttatagcatacaaccaatcatttatattcctattatctaagattcagttaatactgactttcacaatttaaagcttcagtaattatatgaaaagctatagtttctctttctaaagtagcatttggtcctaaaagtcaagaaaataaggaagtaatcacattgatttgctcacaataaaattgtttgtgtaaccttttagattatgatcccatgtcccataaaagctaaacaagttggcacttttctcttattatgtttgacagaacagtatatgagtcactttccaaaaataactaaattaacatatgccttcataagttaatcaaatagcacaaatgacaataacaaaatacatgccttaaaacacacacacacacacacacaccacacacacacacacacacacacacacggatagttacatttccagtacttttagaatcatctgcctattcaatgcaaaagactcaacttcagcagtggctgaagtgactcaaaagttacatctggcttctaaactattacacgactttgttaggaactctgtttcctgattccatttttttagattaatgtaacatgccttcttcgggccctaactacctgtgagaaattaagaagagaggtggtggaaggagaaagtcattcacgccttaaaaacccagctataacaacatggataatttaagtaaaataaaataatcatggtgaaataaaacaatgaagctgaatttttatctggcctcctaagtctcccacaaaaacaaacttaatttgtaatacatatgacattctgggagaagtatacaatgttgctatatcattagttagaaatggaaagtttctttcacctgataagtcatggtgaataaggtcagcaaaactggggtcttcaccccaccaaaatatccacaattctcttcttccaggtctttgatctcgccgccaaacaccaagtacatctgccttaaggcagcgactaaaactgctcaaaatggggtcttcttctgtcacaggaaacagaataggggcagaagttgggccttgccatacatattttttccacttaattcctgtcaagtcagcctgaaggaaagaaagcattaagttttattactgcatattcactcaaagtcaaaagtactcaatatgatgtctcttatttcattaagacattacaatttttcaatgtatgcttgagatattgactgcaaattagaacaaaaaaagactttataattcaacaaccaagaattttagggagaagaatacagttaaaaattaccaccaccatgtcactgaatagcaagcaaatatgtactccaagtagaaacagaagaaactgaatgatgttaaatatagacacacacttcaatatgcaaacagagtacatttttctctgtcctaactggtcacatttgttcactggtgtcaaacttttaactgaaaatcaattattaaagaccctatcatgggtttttattccacatttacagaagtaacgtctctaatgaaaagacatctgaacaagttctgaaaaaatctatgttaattcttcacacacacccctgtcggaaaagtcaaatagctactcacaaagaactgtcagatttgtgctagtctatcttcaaagaactgatcctaaaagtaccaaaaatagactgagttggataagatagaaatataaaacctggtgtatgtcttattacatgtgaagagatgctgattaatggacattgaaaagaaaaacatactgtagacgaggatagagtattaaagatctcaatttagcatgggcgttaagaaattcgacaagaggaattcagtaatttaatctaacttaaaggagcaaagcataaggtgccaaaaatgaaactgctgatacatgactggcagtttacacttgccaactagttgtgctcctcccacttaactcacttacctatcatatactcttaatatttctcatagcacaaaggagaaaatgaaaaagtaaagtcacccaaacttaaagtcattgatgaagctcagctactgtcccatacaggacaagttatttgcaacagttggtacttctgaaagccttaactgttggatgttaccagacctgggctaacctacacaatgatcatccctacatcccgcttctctcgactttccatttcaatcaaacaagggagcagcctgctcaaaacattctgaaaaagcaaccaaaacacaataaatatagaaacagtgcaaaaccacagcacctcgtccactagcccccttcactctcacaaaaacatcatgttctaataaaagcaagatggctagaaattgtcaaaaatggcaaactgttttcaaagtttaaaaagaaaacatatgaaatggcacctactggcttttacagagagatcttaagtcacccaagaaagaaactaacctggcgttagtttgactcatacaaaaaaaatgtaaaaccaagacaggtttctagggcttaagttctggggtcctgtttacatggggaaaccaaattaaaagggtaagacataaaggcggtggggagcaggggcaataatgtaaagtgtgaagcagggatacagggccaataaggagaaaagcaacagttaagcaagacaagagggaaaggttactgtcctgccagataaggagctcaagttgaggacgagactacggtgagaaggagagtccgaaacaagacgagaaaaaatgccaacactcccctaaacagagcccgggaccgtaggagagcgaacgccgcctcccggggctggccgcggagcttcgcagggcgccggctccggctgggcctcgcccgggaactcgggcatctggaccagacccggccccctcccccacggcccaagggcgcacctcgcggcccccctccctcggcgcccgccggccccggcactcaccaggcagaagaggttacagtgacaatcttccaggctggccccgttcggcacgaaggaggcactcatcgtccctcacagcagccgccgccggcgccacaacccaccatccgccattaccgccgcctccgaccagagagagaaacacagacaccggggagggccggggggggggtagtggttgggggggcggtggaagaggaggccgccgggcgcccgccctccccacccacccccccgccgccgccgccgccgccgccgccgcgagcagcccccgccgcccggccggcacccagccgcccggggccgagggccggaggcgggagggccgcgccgcgctcgcctggcgggccggactgcggatcccgcagacgctcgtccctctctgggggacggaggggatgtgtgcccctaccacaagaaaaataataaattacacaataaataatcaaaatcaagtccgagacggcagagcccaagcccaggacggttctcccgggcggagaggcgcccgcacaggagcgggaagggcgagaaccgggagagaagcccaggcccccggcgcggcagcggcgatgtccttaagcccagagtctcctcagcggcggaggtggtggcggcgtctgcgggctcagaccattctctggctctgtcttcgtgtcgttcctgggccaagccggcctaaagtttgccctcctgtggcctcaccggctggacgccgtagtctcccccattttgtgggcccagcgggcggtgtttttccccctttaatccgaattcacgggttttcccttcgctttaatggcggccacagggaccagctcgccctctctgctcacccattggccgccttgaggtcacgtgggcccgggctcggttgggagggggagagagaagtgagcgagggagggccgggaagctttcggcggaggcggtgagctcgggggacggggcagccagctggtggccactaacatagcgccatctgctgggtgccccggccagtataaaacgacccggggccctggccctctctttgcggggaaatttacagtccaggaaggttcatttcacaaatcagtgagaattacgtggaaatcagtttgagttctttggaagagaaagtattggcaaaaattccaagacattctcatttatttcgcgaggccgctggggtgcaggtgcaaacctctggatttgggagtcagatgatctggatggggataagactcctcaacctaaaagttgtgatatgaagatataaatttaagaaacaaaatattgccctgtagttaatagactgggaattagagccacactgcctgggttccaagcttgagcaaatcacttcctgctctgtgtctttactcatctgtaaaatggggaaaacatatcccttaccccacaagcttattgtaatgagttaatacaaattaagcaggtagcccagtgccccgcacagataagcactgttaagagttaactattattgttgtcatcattacctcatatagttattgtgacgagcaggagaactagtgtatgtaaaggtctcactatttttttgttgtttacttctgtctctctagtgcctaaaaaaaggttcctagcacacagtaggtgcttgatatttgtatagttacaaatgaatgggtggtaagaagtaagaaccaaacaaaaggtttattctctttcccataaaacacccagtgcttggatgggttacacttcaatatgagttcaaaacagtttctctgacggttttaggattgcaagaaagaaagaagaagaaaaagatgattcagaagttagaaacatcagtgagttaggacttactgtaattttatgtattacagatacataattatgtattatgtattacagatacataattgtatctgtaaaatgaatggtagactcttccatgtcacttcttcagccacggaatgaaaagaagtcctcatttatccacttgttcatctgtggtggtgaagagcccagatctgaagcccaaagcctggagaaaaagttctgcccctcactagttagtcttagatcatatttgaccttagatcaaattaattttgctttctctcggttattgtaaaatgggggtaataaaagtacttttcttctaaaatgactggtgaatgaaacaatgtagatacagtgcttgccacagtgcttacttaatgttaattattaatgtaattttaaaaatcattgagaacctgctggctcaattgagtgtgttcctgctctgtgctaggcctaggatacaaataggaataagatacctgcctgtccctcaagattcctgaagagaggcactaaaggaaacatttcctacagaataaggtaaaatacaatgggggtaattgcttgaataaagtatgtacctactatggcatagtaagtgcactagaagaagagcatcaaacttagagaagttgtcataaagtaggtagcatttgaaatcagatttgaaggataaaatgaattcttataaagccctttgaagcagttaaatcttattaaacctaattcgaacccaaagtccacatatcaaagtcaattatgcaaccaggactaattcaatccaggagctcaaatcaactaaggttggcatcctttataaccgagtgccagcaccaggagacagcaatccccagatccaatgaggtaagcgctcctctgcccatttcccgttccctgaaaaactcctcagatctttgttccgctgctttcctcaggctgaaatgccctcctcacatctaaaggggtctccattctccttagaagtcttgccctcccattgcccccaccccctgacttgagcaccatcctcaggattccaatggcaggtagaatatacctgaaacctaccagtaggaggtaacatttgattgacctttctgtttgaatgtcaatcttttcaaaaagaagagggagacaaggagacagaagcgaagaagggaggaagacccagaagaaaaagtctgatggaggatcgcagaagggagcaggagagagagagaaagacaggactgagagaatggagaagcagattagaatgggggggatcccagttgtgaggggaatggaatcattgggagaagggaaagagaagaaataaatattttcagcccacaaagaacgtatcagtaaccacttacattcggtaaaaatgacattttgtgtgatttaaagagtaatggaggccgggtgcagtggctcacgcctgtaatcccagcactttgggaggccgaggcgggcagatcatgaggccaggagatcaagaccatcctggctaacacggtgaaaccctgtctctactaaaaacacaaaaaggcgggcgcctgtagtctcagctactcgggaggctgaggcaggagaatggcgtgaacccgggaggcggagcttgcagtgagctgagatcgcgccactgcacaccagcctgggcgacagagtgagactccgttctcaaaaaaaagaaaaagagagtaatggaaatacggactttgggtataccatcctggtgggggatgttgataatgagggaggctgtgtatgtgtgggggcaggagttatatgggatttttaaaaagtaatggaaataactaaaaacattacacacatattgtcggccaggtgtgctgtgtcacgcttgtaatcccagcactttgggaagccgaggcaggtggatcacctgaggtcaggagttcaaaaccagcctggccaacatggtgaaaccccatctctactaaaaatacaaaaattagccaggcgtggtggcacatgcctatagtcccagctacttgggaggctgagacaggagaattgcttgaacccgggaggcagaggttgcagtgagccaagatcacgccactgcactccagcctgggtgacagggtgagactctatctcaaaataaataaataaaaacattacacacacattgtcaaaagtttggcagatacataaaagcgtaaagatgaaaattttaaatgtacattacccaaaaaagtccgtatcattaccattcataattaatcactttttaacattttgatgtattgacttttccctatgtatctttttcctacatggttgagatcatactatatgaccacttaactacccacatgtattaaccatctagtatgtgtcaggtcatgtattgacaaaatacagcatatacaagcagctcataatcttgcttataatggcacttgaacagttagaccaactggggtcaaaactccatacttggcccagcacggtggctcatgcctgtaatcccagcactttgggaggctgaggtgggcagattgcttgaacccaggagtttgagaccaacctgggcagcatgacgaaaccccccgctgcaaaaaaaataaaaaaattagccgggcgtggtgacacgtgcctgtagtcctagctacttgggaggtagaggtggggaggttgattaagcctgggaagttaagattgcaccactgcactccagcctgggtgacagagtgagaccctgtctcaaaaagcaagcaaacaagcagaactccatgcttgctagctccctaacttcaatttacccctttgttgaatgtgtatgtaataatagcacctaaatgtcagagttgttgcaatgattaaaagagataatccaagtaaaataggagccaatcaggaattttaaggttaattttagaggttactttgggtcaataatctgggtcaataatcaccgactgtcttctgttctttgaaatatggattcactcaatgatctgcatttaaaactgttttgtaaccccttctgtcttgtagggtctccattctgaatgagatggtagaggcactggcttacaaactaccacttagcctccaggaaggtgacagagttacatcacctgagacagacaagtccaggaaagggcccctgatgctccatattgtgattcagaatcagatgattctgaaaaatctgcaaggtctagagcagcactgtccaatagaaatgcaatgagagctaaaacctattgaaatagaaaaataaatttttaaaaaaggtacaatgagagctaaataagtaacttgaaatttttcagtagccctgttaaagaagtaaaaattagggcctggcgcagtggcttatgcctgtaatcccagcactttgggaggccgaggtgggcagatcacggggtcaggagttcaagaccagcctggccaacatggcgaagccccgtctctactgaaaatacaaaaattagctgggtgtggtggtgcatgcctgtagtcccagctagctacttaggaggctgaggcaggagaatcgcttgaacctgggaggcggaggttgcagtgagccgagatcatgccactgcacttcaacctgggcaacgaagtaagactttgtctcaaaaaaaaaaaaaaaaaaggtaaaaattaatgtgaagtacatattttatttatctcagtatgtcagaatcattatcattttacatgtagtcaatataaaaattgttgagatagtttgcattcctttttttaaccaaaccttcaaaatccacacttatttgcacttatagcacatttcagttttacctagcagatttcaagtggccattagccatttgcaactagtgactactgtgttggagagtacaagtctagagtcaaacgctgaaagctaaggaccaattaagctgtggagtgagtggtcttgagcctggggacaatattgattttcttaaggtcattttaatggtttaatgttgtacttaattcaatagaaaaaaaggttaagaagttacaaaccattttatttcttgaatgcacagacaccacttcattgaatatagaaataaacagacctaaaacaaatcagcaggttgagacacttaaaaaaacattttaattcaaagcatcgaatatcctgagttgtctcaaaagttgctgacttgccatttttctcagtagtgtagcatccaccctcaacctcaagttttatttcattttaattgtttcattttaatattaaagtctacttcccctaattttcttactttgaaattacgtttgtaaaccatatgcaaatcagaaattcccctcccctatctttctcctacttgagccagtcatttgacctctctggatctattttctcaaacatgaggaagagattggcttaagtaattgctgtgatttaacacctaatatgtgacaatatatatcagacacggtgtcaagtatctttgccacagtttctgatgtaagtaccatattatcccaattttctagcttgagatactgaggtttagatagcaccctgcctctttggcctcaggccgaagaggtctgtaaagtatgctaaggaagcctcatctaccaagagaagctctaaagaaacttcttagggaaaacagttgaaaccaagtcttgaaggatgagttgggttgagcaaggaaaagattgaaagggagaagaaggacaggcacagaaggaagatggggaggcctgaacagcttggtgttggtaggaaatgatttggctggtgaagtaaccccaggaacaaatcatgaagaatttggattttatccggaagagaaaaacaacttttttttttttaagacaaggtctctgtcgcccaggctggtgcgatcatagctcactgcagcctcagtctcctgggctcaagcaatcctaccacctcagtctcctgagtagctgggattacaagcgagtgccacgatgcccagctaattaaaattttttttcttttcttcttttaaaaaataatttaaaataaaatgagatggggtctcactgtgttgcccaggctggtctcgaactcctgagcttaattttttaacttttttttttttgagatggagtctcggcctactgcaacctccacctctcgggttcaagcgtttctcttgtctcagcctcccaagtagctgggattacaggcgcccgccaccacgcctggctaatttttgcatttttagtagagacgggtttcactgttttggccaggctagtctcgaactcccgacctcaggtgatccacccgccttggcctcccagtgttgggattataggcatgagccaccatgcctggccaatttaaaaatttttagtagagatgaagtctcggtatattgcctaggttggaaaccattgaaagactttaaacatgagagtgatgagctaagatttgtttttagaaacaagataccaggaaacttgttgaggacattttggtaatctaggcaggaagtgaagagacctgagctaattaagaagagctggtctaaaaacatcctttctgttttgcatctattccctcagtcaaggcatcgacaaggaagatatggaagtagaagaaatcacttttgcaaaggctgagtatgcttttcttactgagcagacgatttttctaagagtgaccaaagctgaaagaggagacaagtgtagttctttgaacgtgctcctcctgctaaaaagttccaggcagaactttggtctcacaggataattattcctgcccagatacaaactgatttgtaattttactgttctctccccccaagaaaaggttcaaaggagttcaaaagatgtgaccagccaataaaatagaaagattattctagaatctcttgactcaaccaagagtttaaagggatgtaatagtaatataaacaggctgggcacagtggctcacgcctataatcctagcagtttgaaaggccgaggcaggtggattgcctgagctcaggagttcgagaccagcctgggcaacatgctgaaaccccgtctctactaaaaatacaaaaaattaccgtccgggagggaggtgggggccagcccccgcccggccgccgccccgtccgggaggtggggggcgcctctgcccggccgccccgtctgggaagtaaggagcccctctgcccggcagccaccccgtctgggaggtgtacccaacagctcattgagaacgggccatgatgatgatggcggttttgtcaaatagaaaagggggaaatgtggggaaaagatagagaaatcagattgttgctgtgtctgtgtagagggaagtagacgtaggagactccattttgttctgtactaagaaaaattcttctgccttgggatgctgttaatctataaccttacccccaaccccgtgctctctgaaacatgtgctgtgtccactcagggttaaacggattaagggcggtgcaagatgtgctttgttaaacagatgcttgaaggcagcatgctcgttaagagtcatcaccactccctaatctcaagtacccagggacacaaacactgcggaaggccgcagggtcctctgcctaggaaaaccagagacccttgttcacttgtttatctgctgaccttccctccactattgtcctatgaccctgccaaatccccctctccgagaaacacccaagaatgataaataaatactaaaaaaaaaaaagaaatggtagcagtggacacctttaccttgtttccaatcttagtgggaaagtattcagtttttcaccattatgaatggtgttatctataggttctttgtagatggccctcatcaatttgaggaagttcccttctattcctagtttgctgactatatttatcatggcccgaaggtgaactttttcaaatgccttttctgtatctattgggacaaccatatggtttgttttttaatacacttatgtggtgaattgcaaaaaaaaaaaaaaaaattaaccaggtgtagtgtcgcacacttgtaatcccagctactcgggaggctgaggcatgagaatcgctggaacccgggaggtggaggctgcagtgagccgagattgcaccacagtacttcagcctgggtgacagagcaagactccatctctaaataaataaataaatagtaacataaacaaaagtactagagttatataacatttctaccactggttttgacattacttcattcattcatttaataatatttatgtttactatgtgcaaggttctatgctaggtactgtgatgattgagcaatatgaaacaatgcatcagaaatagagctgactctcaagaagatttttaattctcagatgataagatatgaaataaataactacaatttttatttgaaaatgcgaaaaattgatatagatcaaatgttgtggaattgaaagaagagggggctaccccaagtcacaaggaagaaaaggttagtggagaaaaactttgcattttaaatagatacgaattaatgaataagattggaacttgcagagatgtggaaaagagcaatttaggctagtgtttcccaaactggagtttgaggacaaggttttgaagaatgctactgggaattccatgtaaaagagttcttggctgtgctgttaatttgcctctgttctttttttttttttgaaacagagtcctgctctgtcgcccaggctggagttcagtggtgtgatcttggctcactgcaacctctgcctcctgggttcaagcgattctcatgcctcagcctcccaagtagctgggattgcaggtgcccaccaccgtgcccggctaatttttgaatgtttgtatttttagtagagacaaggtttcaccgtgttgcctaggctggtcttcaactcctgacctcaagtgatctgcctgccccagcccctcaaagtgctgggattacaggtgtcagccaccatgactgaccttttttttttttgagatagggtctcattctgtcacccacactagagtgcagtctggagtaccgtggtgcaaacatggctcactgcagcctcgacctcctgggttcaagcaatcctcctacctcagcctcctgaatagctgggaccacaggcgtgcaccaccatgcccacttaattttttaaattttttgtatagacaaggtctcaccatgttgtccaggcttactgtagctagaggctgctccttggaaatgacatttctcaggctcccttatcaatttccttgtggtttggtttggccaatggaggcaagggtggcaaatgaggggccatgaggaagctaggattttccctctccctgtgcctcagtattggctgtatctttatggcgcgaactgcaaatgaacagttcttctctccacagtcccaactctgttgggcagtcctggctcctggggtatagtatgtttgttatctattgccatataatacattatctctgaacatcacagcttaaaacaacaagcattttatctcacacagttcctgagatttagtaacctgtcagtgactcagctggtggttctggctcagggtttctcatgaggtttcagtcaagatgtgggctggggctgcaggcctctcaaggctaacgtaggactgaggcactcacttccaagctcactcacacggttgtggccaggacacagtttccttctgccaggtgggcttctcctcagagctgcacacaacaacgcagcttgcttctccactaggaagaagaagggggagacagagagagtccaagaccaagatggaagctgcagtctttttgtaacctaatctcagaagttatataccatcacttctgccacatgctattggtcacagaccaactgtgatacagagtgtgcaggggctacactaggctgtgaataccaggaggcaaaaataactgagagctggccgggcgcgctggctcatgcctgtaatcccagcactttgggaggccaaggagggtggatcatttgaggtcaggagttcaagaccagcctggctgacatggtgaaaccccatctctactaaaaatacaaaaatggtgaaaccccatctctcctaaaaatacaaaaattagctgggcagtggtggtgcacgcctataatcccagctatcaggagactgaggcaggggaatcacttgagcctgggaggcagaggttgtggtgagctgagatcacaccactgcactccagtctgggtgggtgacagagtgagaccctgtctcaaaaaaaaaaaataataataataataatagggagctattttggagggtagctaccacagtccaccatctgtccccaatgatttgttgctcccacatgcaagttacactcacttcttcccaaagtcaccaaaagtctcccctctttacagcatcagcttgaagtccaggtgcagatgaggctcctcgggtaaaactccttaagcagagctccttgagtacagttcctctccacctgtgacaccgaagagacaatttatcttcccctctatatacccaacatacaacgatgagacaggtgtagcaggatagaggcttagttattccttttcaaaaagggggggaaatggcaggtgccaaggagtaactggcccattttaattctgaaataccaccccaccacccatgtaggtctgtgaatcttactggggttcacttcattagacaaaagttatacccacaaatctctttcaggtaagctctactccacaccttgagcttctgataagatgcccttaagctttctagcagttttgtcattttactaagagaatactgtatgggaggcacacatttcttctctttcagagctttttgtctcactgaataatactctgaggcacaaccttaaatcatcctgagatttgatttttgtttatttatttatttttgagacagagtctttgtcacccaggctggagtgcagtggcacgatctcggctcactgcaacctctgcctcctgggttcaagcaattctcattcctcagcctcctcagtagctgggattacaggcatgcaccaccacacccggctaatttttgtattttttaaaatagagatgaggtttctccatgttggccaggctggtctctatctcccaggctcaagcagtccacacacttcaccctcccgagtagctgatattacaagtgtgcctggccaattttttgtatttttttttcatagagagggggttttgccatgtagtccagcctggtctcaaactcctgggctcaagaaatccgctcccccatggcctctcaaagtgctgggattacagacgtgagcaacagcacggggcaatgttaccgcgttttcttgcaagccttcacctgcagccatttcaaagatcatgatgtttctattaatagcttctgtgaggtactttagactttgactaatattctgctcaaagcccactgcctagttccaaagtcactttcacattttagaattttgttccagcaaaaccctacttccgggtaccaaaatctgtattagttatctatatttctgtgtaacaggttactctgagattcagcagtttaaaacaacaaatacttattatctcacacaatttctgagaactgggaatctgggacttggattagctcagtggttctgaggtaggaagcaggacttaactccagagttggaaactcggacactggaccagattgaggactaccttaaagggagggggttggctggtgtggtggctcatgcctgtagtcctagcactttgggaggcgaaggcgggtgaaccaattgagctcaggagaccagcctgggcaacatggcaaaacccatctctacaaaaaaatacaaaaaacattagccaggtgtggtggcacaagtctgtggtctcagctactaggtaggctgaggtgggaggattgcttgagcccaggaggtggaggctgcagcaagctgagatcgtgccattacactctagcctgggtgacagactgagaccccatctcaagaaaaaaataaaaaattaaataaattaaatacattttaaaaatataaaggaagggggagaagggaaaagtagctttccataagacatgcccaccagtgtgccatatcagtttaccattgccatagcaacaagcggaagtagttatacccttttccatggcatgatgacctggtgactggaagtggcaaccctcttcctagaaatttctgcataaaccaccctttaatttgcatgtaattaaaagtggatgtaaatgtgactacagaactgcctctgagctgctattgtgtgcctctgttgctgctgtacactgctgcttcaaaaaatgttgctaacaccactggccaacccttgaattctttcctgtgtcaagcaaagaaccctcccaggctaagcccgaattctagggcttgctgccctgcatcagttctggctcaaagtttctcataaggttgcagtcaaattgtcacctagggctacagttatctcaaggctttcctgggactggagaatctgtgagaaaaatctgtagcacatctaagtaacaattcctcttcccttatccttgcggcatctccctcatgttgttcatctctgggttgtcccaccatccctctgtttgccctttgaattcctcccctacattttaaactagtttctctcattattttattccttgtattaaactctttggcataggtactgttttctggatcctgaattatataatagttaactaagtattattgagctgaacaaagttaaacagatttcttacaaaagaacttctcagggcttttaatgcgcattgtaaatctcccagaggaatctataacatgcagcatttcccatactgttttggtcacagtcctcttttgttttttttcatgcaactaatagctagcatgcaaaaggcataaattagaaacatcgcagttcagtttgactgaaacaataagtatatgaaggaaaagagtacaaaatatgatgaaaagagggtagaggcccggtgcggtggctcatgcctgtaatcccagcactttgggaggctgaggcgggtggatcacctgaggttggaagttcgagaccagcctgaccaacatggagaaaccctgtctctactaaaattacaaaattagctgggcgtggtggtgcatacctgtaatcccagctactcacgaggctgaggcaggagaatcgcttgaacccgggaggcggaagttgcggtgagccgagatcgcaccattgtactccagcctgggcaacaagagtaaaactccgtatcaaaaaaaaaaaaaaaaaaggtagggggtagatgctgaaccatacagagtaacgtgtttacacttgatcctataggcattggagagtcaatgaaggttgcctcctgctaagttaaaagatagaattgttgagctaaatcatttaaccacagtaatatacactttatttttcttttatactctgaactacttaatacaaaaggaaaattgcttttctttttgagtcagagtctcatggtattgcctggtctagagtggaatggctattcccaggggttatcattgtgcactacagcctcaaacttctaggctcaaatgatcctcctgtgtcaacctcccaagtagctgggactacaggcacacgccaccatgtccagctgagaattacattttaaacctctctctttcttttgcctttacctttggttcaatagggttgaagacccttggtccaaactttagaagcctcatattgtctgccttatgttttcaatatggtagaagaaacagaaaaaaaaaaatggggagacccttgggagagaaaatatttcaacataccccctaaaacacagcattgtctgtggaattaaaagatgaaggaattcttttcaaaataattggtgataagaaaggaagatggaagtatatctcaggggaagaattagctagtgattaggaaaagaacaaacatcctttctgaaaactaacatttacatggcagcacatatatgacttatttattgctgcaaaacaaattatgtcaaagatttgtggctcaaacaacaaaaaacttttttttttttttaaagacagagtcttactctgtcgcccaggctggagtacagtggcactatctcagctcactgcaacttccacctcccacgttcaagcaattctcatgcctcagcctccctagctgggactacaggcacgcaccaacacacccagcgaatttctttttgtatttttagtagagacggggttttgccatgttggccaggctggtcttgaactcagcctcaagtgatctgcccgtcttggcctcccaaagtgctgggattacaggtgtgagccaccacgccaggtcacaacaataaacatgtctatctcatagtttctgtggctggacagttctaagttagaatttctcctaggattcattcagatgttggctgtgattgcagtcatctgaaggcttgagtcaggctagcagatctgcttccaagagggctcactcatacaaatggcaagttggtgctgtttattgtcaggaggcttcattttcttttcacatggatctatctccaggggtccttgagtgcacggaagctggctttccccagaggaggggatccaagatgccaaggcggaagttacagtcgccttttttatctagcctcagaagtcccacactgtcacttctgcagtaatctatttgtcatacaaatcagccctgatacaatgtggaaggggaatactatgatgtaaagatcattcaaggttactttggaggctaccttccacatcatgttttttacctttctaggttcctttgctgatactcttttcctcaataaagcaacttacaaaatagatacatcttgggtagccaaatcaagtacaccatactgaaaacgtcacagtatctggtcagattttttaaaatttcagtgtaatttcagccaatcatctggctttctgtctttcgaaaaatgtacggctttcctgttgcaaaaaataagcaagtcaggaatctctcaagaacaaggaccggtccaaaggctgaaaatacagcattaatggagaaaagcagtgtctgatattagttttggcattctctactcgccgttaataaattcatctgttttttttttttttctgggataggtatgtgtaatattccacatgcttgattttagaagatgtctttttatttttatctttttgagacagagtctcgctttgtcacccaggctacagtgcaatggcatgatcttggctcactgcaagctttgcctcccggactcaagcgattctcctgccttagcttcccaagtagctgaaactacaggcacatgccaccacacctggctaatttttgtatttttagtagagacagggtttcaccatgatggccgggctggtctcaaactcctgacctcatgtgatctgtccaccttggcctcctaaagtgctgggattataggcataagccacggtgcctggccagaagactttttttttttttaaagcatggaaacaatataaatatttaataacttttgttttctgtaaaaaagcccaggctgcatccattcaaaacttttatctttcaatgtggaataaattactaaaagtataggaccaaaatcaatgttacattttaattaacaaaaggatgtattcttctcacaggaacaacctcaaactttatatagttccccactatgagattattccaaagacaaaggactgcactttccatctgtgatttgaaaacagaggcattatggtgtatgcaaagtatcagttctagaattagacaaggattttttttttttttttgacagagttttgctcttgttgcccaggctggagtgcaacggtgtgatctcggctcgtcacaacctccacctcccaggttgaagccagtctcctgcctcagcctcccaagtagctgggattataggcgtgcaccaccatgcgtggctaattttgtattgttggtagagacagggtttctccatgttggtcaggctggtctcgaactccggacctcaggtgatccaccctcctcagcctcccaaagtgctgggattacaggcgtgagccactgtgcccggccaactatttttatttcttcttgttgttgttattcttgttttgacacttcctgcactgcactcattgattcccttttcatcttatgtgtgggcagctgataacctgttcagtctccactatctcaggttgacaattccacctactggccaggcatggtggctgatgcctgtaatcccagcactttgggaggccaaggcaggtggatcacgaggtcaggagttcaagaccagcctgaccaacatggtgaaaccccatctctattaaaaatacaaaaattagcttggcatggtggcctgtgcccataatcccagctattccataggctgaggcaggagaatcacttgaacctgaacccaggaggcagaggttgcagtgagccgagatcacgccactgcactccagcctgggcaacagagcaagactctgtcttaaaaacaaacaaacaaacaagcaaaaggccaggcgcggtggctcacgcctataatcccagcactttgggaggccaaggcgggcagatcacttgaggtcaggagtttgagaccagcctggccaacatggtaaaaccctgtctctactaaaaataaaaaaatcagccgggcttggtggcgggcacctgtaatcccagctactccagaggctgggacaggagaatcacttgaacctgggaggcagaggttgcagtgagccaagattgccccactgcactccagcctgggcaacagagcgagactccatctcaaaaacaaaacaaaacaaaacaaaacaaaacaattccacctactttcttatattaatcatcaagtgccctggggaactatgacttctcaaagacatcttattacatttttaccatagccagcaccataccttggggactctggtaataataaaataataataaatataattattgaacatttactggcccatagtgctaagcaatttacatagatgatttttttttaaattggtttcttggtatcttctaatagattatttgatttcatcctctccacaaccataggaggtcaaatttgagcagacaggtctacagaggctttatctgcattattataaattaaaccatttacaaaagacagtgaccggatatgttaaggtatatgactagccctatacacgaagatgtaagagaggaaacttctggcatatgtttactaaacctaggaactacagataaaactgatactacaattttttttttttttttgagacggagtctcactctgtcacccaggctggagtgcagtggtgagatctcggctcactgcaggctccgcctcctgggttcacgccattctcctgcctcagcctcccgagtagctgggactacaggcacccgccaccacgcccgactaatttttttttgtatttttagtagagacagggtttcaccgtgttagccaggatggtcttgatctcctgacctcgtgatctgcctgcctcggcctcccaaagtgctgggattataggcgtgagccaccgtgcccggccagataatactatttcttgcagcccccaatcaacctcacctactagcacttacaccctaagtagtcccctcctcttgaataagggccagtcagaatgtagcagaagtgactcgttgcctcttccagccctaagccttaagaaggcccaacagcttccacttttatgcttttaggagccctgagctaccatttgagaaactgatgtggagaaacagattccctgggagtatactgtgagagagaaggtctagccttaccagcatccagctgagcgcagcattccaaatgtcactgataaagtgtcagacatgtgagcaaggccatcctgaagatgccagccctgaccgccacctgactacagctatgtgagacacacaaatgagaccagcagaactgaacagcacagcacccaccagtcaatccacacaatcatgagaaattaaaaaaaaaaaaaagattgttgttttaagccactacattttggagtggtttttattaagcagcaatagataacaaaaacactactaatgttaataatgttaaaggttatggttggtttggagtcctattagataatattaggtcaagaggcccaaacatatcagaatcctaccttagactacagccattacctcctccttcaccctcaccaaggtctagagggagaaatctacacacatgagacagtggagaaggtaaattaaaaccaccaccaccagggcagccagaaccctgcttagtcaaaatagacaccaggctaggcatggtggctcacgcctgtaatcccaacactttgggaggccaaggcgggcagatcacctgaggtcagagttcgagaccagcctggctaacatggtgagaccccatctctactaaaaatacaaaaattagctgggctttgtggcaggagcctgtaatcccagctattcgtgagcctgaggcacaagaattgcttgaacctgggaggcggaggctgcagtgagccaagatagcaccactgtacttcagcctgggcagagcaagactccatctcaagaaaaaaaaaagaagaaaaaaaaaaaaaaaggacacccactgaaacaggctgcaccttcacagtatgactatccacctggctattccctctctcgaagcctgagaacaggcctacgttagagtgtcactgcagtatcatggggaagaaggaagaagaggcccaaagggagccacacccacgtgcaagacctaagcacatcctgcatgatgctgaacactgggaaaaaatagcccagttaatgtcttagaatctgaccaatcagattagccacttctctcatggagaggagggagaacaagaggaagataaggaagaaactgaaagtgtcccctttcctagaccctgtacacattgtcttttttaatcctcatgataaatccaaaaggtagatatttttcttaccctagtatccatgagaagattaaatattagagagattgagtaactttttcaaggttacatagtaagtatttggaatcacaggggtgggtggggggagttacctggcaaaaatgagaagagatgcctttggagcatggcacattgtaaattcactcacattgttccctcagttgttttttttgttaaagtaaaaaaccaaatcaaatgaaaatgctgtagggccaggcgcggtggctcatgcctgtaatcccagcactttgggaggccgaggcgggcagatcacctgatgtcaggagttcgagaccagcctgaccaacatggagaaaccccatctctactaaaaatacaaaaaaaaattagccacgcatggtggcgcatgcctgaaatcccagctactcgggaggctgaggcaggagaatcacttgaacccaggaggcaaaggctatagtgagctgagatcgcgccattgcagtccagcctgggcaacaagagcaaaactccacctcaaacaaaaaaaaagaaagtgctgtaccattagaggcacccaaggagagatggcccaaagtcagtcttttttgtggcttgattgtagaacaggtggagggaaagtatctctttccacttcagcagagaagtggctgcacgccggatgtgactggtgataagagtcaggaagtagccactcagaagtgcacaagaggcttcccctacctccgtatatccttgagagatacagaagggacctgtggtgttaatgacctccttgtaagggctgctatggtccgtagtatccaattgtactgccacactagactggcctggagaaacgtgtgttacccaaacattacatctctgacgaaaaactatatttgttccacccccacattctccactcaagttcccagaagtttgcaattatcctcaaaagaagtttccagacaaggcttactcagctttggttttcagtgggatgagattgttttgttttgttttttcatttctttaaacttggctgaccattgccattccacccccagatggtgcgtacaggccagtcatgaaccacaaacctgtttccattcactcttcacctgcttgttctttttgctcctctccctggatctgtggctctacaatccagctggatctatacatctccctcttttgttcctgtcaccctcactacataacctgttggacctctcttgaggcctcttggactttgatccttgcccagttttcagctatactaactcctctggcttggtatcccatattgactagctgaagttctccatactaagttccagtattgcagaattgcaccagccaactggacctgggtggcatgtaatgtctaagccctatgcattgggaaagaaactctatctggaaaaaacaatggcagggatgaaagaagagttgccttttttttttttttttttcccaagacggagtttcgctcttgttgtccaggctggagtgcaatagcgagaccttggctcattgcaacctccgcttcctgagtttaagcaattctccctcctcagcctcctgagtagctgggattacaggcatgtgccagcacacctggctaattttgtatttttagtagagacagggtttcaccatgttggtcagggtagtctcgagctcctgaccttaggtgatccgcccacttcgacctcccaaagtgttgggattacaggcgtgagccaccacgcctggccaagagttgcttttaaactgtacttgctggcactaccagcaaaatttttacctgcccgcctctgtactcctttcctctgactccaggagatttggaagtataagaaaatctccttggttacaacaactttggaacactgtttggcagtatctactaaaactgaacatatgcatatacttttacccaacaattctactcctagatacatacccaacagaaatgcgcacatatgttcatcaaaagacatgcacaagaatgttcatagaaggattactcataatagctaaaaactggaatctccaaatgtccaacagcagtagaatggattaaaaatagcatattcatacaatagactatatagtaatgaaaaagaatgaactgtgttatacacaacctggatgaatcttacaaacacaatactcaacaaaaaaagccacacaaaaaagcatgcataatatacattccacttgtatgaaatctaaaacggacaaaatgaatcaatgttattacaagtcagaatagtggttatcatacggggagtagtaatcaggtgggggcatcagacgattgggtgctggtaatgttgtgtttcttgatctgggtactgatcagtgcattcactttgcaaaaattcatccagctgtatacttgcaattcatgtacttttctaaatatggatatacatgaataaagtgaatgacagaaagaaaaatgtccttgctttctcctgaaaatgtagctataaaggatacccaaggttagtgactgagtaaatgaattttcttgtttcccatttgtcattcgggaaaacctagcaatgtgtgattcttctgctgtaatggatacctgtcccctgtacaagtggacatcatgatatttggtgggacatgaccagtgggatggttcacagccaacattatacggctctccaactcttggttctcaggtggaccggaaggaacatcactgtgggcctagctctgagaaggatctggagggtgtcctaagatgagttaaccagattggctggatgagacagcttgcaggctgcagagcatagggccacagaaaatttaaaggacactgtcaaggtctgaagatggaatagaagaacagggagagtatcttagagaactacttcaccaaaagggttaggcagaacagcagaagataggtacatgacaacaggatggaaatggaggccattgggacagagtgagtggttttggaagaaaatggagcctgggaatgaacaatcacaggctttctatagggctttttttttttttttagcctctatggaatgggcaagagctataaaagttctgagctgctatagacaaaagttctgtactgtttccactactctcctttctgggctgtttgttttggtgacattctccattcacattttacctccagactctccttccagcttctagaattttgtttccttgaatatttttcagctctctggcttctacagtttgggcctcctattggggtgaaaaattttatactttagccaacgacatcccagccccaacccatgactcccaacgccttataggttaactatattcctctccttcagtcaccgtcaccccaccaggatggggatcctggatttaaaacaacaacaacaacaacaacaacaacaacaacaacaacaacaacaacaacaacagcaacagcagcagcagcagcagcagcagctggaaacaagcaagcctattgcttcagaattcaagatcatttctttgctgctgaagcccctgtacaccttctctgacactccatccctgctctagtctggtcccttttggactatgttattgtacttggcaaatccatgcaagttggcttgggaatcttttttttctttttctttttcttttttttttgagacagtattttgctcttgttgcccaggctggagtgcaatggcacgatcttggctcaccgcaacctcctcctcccgggttcaagcgactctcctgcctcagcctcctgactagctgggactacaggtatccgccaccatgcccggctaattttgtatttttagtagtgacggggtttctccatgttggtcaggctggtctcgaactcccgatctcaggtgatctgcccgcctcagcctcccaaagtgctgggattacaggcatgagccattgcgcccggccagcttgggagtcttataaagagatccctagtatgtcttccatgttgggaattcctgcaggctttagttttttctttagcctttgtttctaatcctgttgtttttccatatatgttggttctatactttggcacccctctaggacagtaaggacaacaggcaccctaccctggttgctctaggatgccaccctacttggccatcattatttcattttataccatcaggagaggataatcagaattcctttgtttctatgctctttcttgctgcttacctggctatttgatattctctttctaaaatgttgcaaacagatcttagtcaacagcagcaataaagggtggtggaagtctgcattttggaaaccaacaaaatggagttgaaatcctgcatctatctaccacctattagctaggagactttgtgcaagttacttaacctttctaagccttagtttcctcatctgtaaaacagggatcaagtcttgaagggttgttgagaggtttatgtaatattatgtgaagataacatctggcccatatgagcgacttaacaaatgctggctgttattgttgggctctttgttataagaacagtcattatctaccttcccagttactgaatggtgttaaggagtccagctgatctaaaaaaaaaaaatgaatgcatttgctgagaagtacataaatgaatccctctttatgagtgtcagccaagagaagcataaatagcaaactctgcaaagaagcacattctgatgtacagaagaatgcaattcaagaatacaaattaggccgggcacggtggctcatgcctataattccagcactttgggaggccgaggcgggtagatcacctgaggtcaggagtttgagaccagcctgaccaaaatagagaaaccccgtctctactacaaatacaaaattagctgggcatggtggtgcatgcctataatcccagctacttgagaggctgagacaggggaattgcttgaaccagagaggtgggggttgtggtgagtcgagatcgtgccattgcactctagcctgggcaacaagagtgaaacttcttctcaaaaaaaaaaaaaaaagaaaacaaatttaacaccaaaattgcatttcacaataaaaggcataaatattaagaaattgaaataataaaaagaaagtcacagtcctagagtattgctggtctcaataaacagctttggattgtagtaggccctaagagaagctagttccaagtagtatatgttggatctgcctatatagaattctagaaggagatggtagttatgttgaatgtggcagcaggctgagggtctgagagcacaaggcctcaaaaagaaacgcaagggtttaagcagcaataacacaaaggccaattaatcaacagaaagcaggagtaaataaatatcagagggcagaacaagatagtgtgaccaaagtacatgcaaacagtctgcagggagcagagctattgatccgtcaaagagctggcctcagagagggtcacagaaaatgtggaaggagaggtagaattggagggagagcagcaaggtacccagagccaggagaggagagctcgcagtgcagaagcaatatcctctctcagcttcaatagctatttatttctctcacttggtaagaatgcatctgtagcgagcccggtctataatcttgcaggcaatagtaattggatggataggagtggggctgagacattgcaagggtctcaggaaaaatatttcaggacagtcttcacaggcttcttggatccaggtttacctgtgtgtcgttgatagaaagagaggacttgatcggagcatggatctgatgagtaaatcccccatgggcagtcctcaggtccatagccttcccagttaataaaacagtaggattatccatggtcactttctgaaaaaattatgtggtgtatctagcagtcttcctggttatagtccaaacagggaaatagaggaaatattctgtgctggggtcaagttttccttttagatgtgcaatgccaaatgtatatttttaaatttacttttgagacagggtctccctctgtcacccaggctggaggtcagtggcacgatctcagctcactgcagccttggcctccccggctcaatccatcctcccacctcagcctcccgagtagctggaaccacaggcgcacaccaccacgctagactaactttttgtattttttggaagagacgggtttttgccatgttacccaggccgatctcaaactcctgggctcagatgatccaccagccttggcctcctaaagtgctggaattacaggcacgagccactatgcccggacttgtacaaattatttaaccagtctgagtcttggtttcctcactagaaaaatggagataatatctattggaaagagttgttatgaaggttaaatgagatacatctcaccatgcctgacacattgaagctaagaacactcagtaagtggtctttctattttctttctgctgatccttgattgaaagagctgtatcttggttgggcgcagtggctcacactaatcccagcactttgggagtgaggctgaggtgggcagaccacctgaggtcaggagttgaagaccagcctggccaatttggcgaaaccacttctctactaaaaatacacaaaattagccaggaatggtggcgtggacttgtagtcccagctactcgggaggctgaggcaggaaaatctcttgaacctgggaggcagaggttgcagtgagccgcaatcacaccaccgcacttcagcctgggcgacagagtgacactccgtctcaaaaaaaaaaaaaaagaaaaaaagaaagagctgtatcttatttcttattgtgaggttccctccatctagcaacctacttggactttttagacacacttggctgctatcttgatcctaggtgctctcttaagaacatagagaaatttgcaattatggtatggtagaaagagtaattgctccctcaaaacagccacgatctaatctctggagtctgtgaatatattaccttacttggcaaaagggactttgcagatgtggttagggttaaggaccttgacatggggttttctgggtgggcccaacctaaccaatgagtcctgaaaagcactgaacctttcccagctgaggtcagagggagatgtgactggagaagggtcaaagagatgtgtatgtgaaaaggactcactgctgctggctttgaaaacagaaaggaaccatgagccaagcaatgaaaatatcctctaggagctagaaaaggctaggaaccgaccgggtttggtggctcgtgcctgaaatctcagtgctgtgggaggattgcttgagcccaggagctcaagaccagcctgggcaacataggaagaccctgtctctgtaaaaataagcatggtgtgcctgtagtcctagctgctcgggaggctgagggggagaattgcttgagcccgggaattccaggttgcagtgagctatgattgtgccgctgcacttcagcaagaaaccccatttcttcaaaaaataaagaagtcggcggggcacaatggctcacgcctgtaattccagcactttggggggccaagacgggtggatcacctgaggtcaggagttctagactagcctggccaacatggtgaaaccccatctctactaaaaaaaaaaaaaatacaaaaattagctgggcatggtggcaggctcctgtaatcccagctactcaggggggccgaggcaggagaatcgcttgaacccaggaggcagaggttgcagtgagccgagatcgcgccatcgcactccagcctgaaggacaagagtgagacttcatctcaaaaaaaaaaaaaaaaaaaaaagtctaggaaataggttctctagagcttctgcaaaggaatgaaaccttgctaataccttgatcttagcccagtgaggtttgtgtcggacttccaacctacagaacaccaagataatatgtttgtgttatttaggccactaaatgtgtgacaatttgttttagcagcaacagaaaactaacatatacaggcactgaaaagggctcaaggccatgagggtaattgacagtatgactagatgattcataaccaagcaatacgtgtggatgatgatttgataaaaaatgatctatcttcctaactcctcttaagtattattccaaaataatatttattttttattcatgatattcaatttaaaaatacagatttggccaaacaaacctatttgctcttgctcaagagtgataagagcattttcttaaaatgtgtggtgataaaacacggtatgtgtggcaggggttctgggttgagcctaagctgtgtctgcacactgaattcaaatatgtcgggccatctcatgagctggccatgattctagccacagaaacggataatgtgcttcatgggatatataataattggattcctcagggctcatgtgctgtgcctaggggtgcctaaaactgagactcccaggaaatggcaattcattcaagtcacctttagtaataaatggttgattgtaaaggtacatattcatggaaacccagaaaaggctgagcaatcagggtcaggaagaaagggctaagaaggtggctatcaattcaaggcagttccaagaccttagctgtgggattttgtgaatctttactcttatgtgactcagacactccctttgtgtctgccacactctgtgctcacaacagactggcgttcataccatctcatctgtgtcttttctgcatcataggttctgcttactcataactaggcttactcataacctgactttagccaaacctttgattcattcaagtcctctcttgacttccccagcttctcttgaccccatagcctttcaactttatttatgcatttatttgttaatttgaaaatatgcagcacctataatgcgcccccatgcacttgattatctagtcagagaggcaacaatcaaataattacaaaagtgttgcaggtacattctggggtactcagcccatttgtttaaacaaagccctaggatgtgctgctgcatgctctgtgaactcgctgccttcaggagcagcagcaatgaactggccatcctgtttaataccacatgacctttccctccccgcaaagtccagatacagctaatgaaactacagattggcatttgaccaaggacaattaatacattggctggccagcaaccagcagtttaattcaaattaataagcttcccttagaaggaaaaaattacagcataacagacattatacagaatggacctgtttatcacagggggataaattttatattccagagccataatctaaatgtagaaggaattcatccatggagaactttctcgttgtgaaagagaaagttagagggcacttgtttgattcaggaacttgaagcagggagaagggcagagagcagggttggttttgcgtagagcacagggctgtgtttatcactcaaatgatggccagagtgaggcttagggaaactgtgccactttctttgcaggaaagtatcatagctctagttaggattaaatcagttatagttttcatgcagtttgcttctcagggattctctgggacagtccttggtctgggcccaagtgcatatgtttcaacacagcactgactcttatgccagactccaggttgtcatgtttatcttaagcaattttctttacaaaaaaattgaattaggctgggtgcggtggctcacacctgtaatcccagcactttgggaggccgaggcaggtggatcacctgaggtcaggagttcaagaccagcctgaccaatatgaggaaaccctgtctctactaaaactacaaaaattagctggacatggtggcatgtgcctgtaatcccaggtactcaggaggctaaggcaagagaatcgcttgaacctgggaggcggaggttgcagtgagccaagagcgcaccattgcactccagcctcggcaacaagggcaaaactctgtctcaaaaaaaaaaaaaagaaagaaaaaagaaaaaaattgaatttaattaactttttttttttttttttgagacaggatctccctctgtcgcccaggctggagtgcagtggcatgatcataactcactgtaatctccacctcctggacccaagcaatcctcccacctcggcctctcaagtagctaggactacaggtacaggccaccatgccaggttaagccttaggcagttctcaaccaagaattttagagatgccatggtattttagacaagccatacaaaggcatcaaggcacaactacagcacatgaccttgagttctccttctggaacccacagttaggagtttatgtagagaaggtcagattcaaaggcagccccttacactgttgattgtgggttggcaacaaagttggcatggctcagttagctataggttctgtgtcatgtcactgccgtggctggaaagaaggtgaggctccaggagtgttgaatagtaacagcattttctttcttttcttttcttttctttttttctttttttgagacggagtttcattcttgttgcccaggctggagtgcaagggtgcgatctcagctcactgcaacctccagctcccaggttcaaggaattctcctgcctcagcctcccaagtagctgggattacaggtatgtgcctccacacctggctaatttttttgtatttttagtagagacggggtttcaccatgttggccggctggtttcgaactcctgacctcaggtgatccacccgccttggcctcccaaagtgctgggattataggcatgaaccaccgcgcccggccacagtaacagcattttctaagaggcagattgactaaagggctggcagctcctgggagtttgtgtactctgcttttgggaataaaacgttggcacgtttgttctgttgtccgaagatagccttcattttgaaatagaaacacacagagaactaagtttcctctgagaccatcaggtggtgtgtcccaaagttgacttggaaagaagtacttggaaagaaatacaacaaagttgcttgtggttattgtggtttatgcagacccaagtcacagtcctggaacgccgaagcaggaatccagaactacagatctgccaagaacagaacatggaccagcaaattggatgtattattcttcattatgagagcccaggggttgaggaaagacaagcatgaaagatatttcagtgtctggaagacctctagctgctagagaccatcccctcttcgtaggatccttagaggctgtctggttcagctttctcgtgttactggtataataaataccaagtcccagagaaactagcaaaccttgcctacttcaattaatggttgaaacatgaataagactcgtgggacaacctcctttttaaatgagatctggcaggaaatgatcatggtcagagctgaaatgtcttttgtgtgagcatcacatttacacacatgctgagaatccatgtgttcaacaggtcgccagcatgtagcgagggtgttgataaagtcccaggtcctcggtaatgactggtgaatggtgtcatttaatcatggaattaggcaagccagaagccccagtggcccttgatccctgcccaaatccagtctatcaccaagtcttgtcaatactgcctctatctacttctttttcttcagaactgggctcactatcatcttctcttgcctgggcttctgggacagtgttctaatggtctgcccacgtttccactgcctgcaatttacttttctcacagcagctgatggtcttccctctacagccttatttatttatttatttatttatttatttatttattttatttttttgagatggaatctcgctctgttgcccaggctggagtgcagtggcgcgatctcggctcactgcaagctctgcctcccaggttcacaccattctcctgcctcaactttccgagtagctgggactacaggcgcccgccaccgcgcccggctaatttttttgtatttgtagtagagatgggtttcaccgtgttatcgaggatggtctcgatctcctgacctggtgatctgcctgcctcggcctcccaaagtgccgggattataggcatgagctaccgcgcccggcctattttttaattgttaattaatgaactttatttttagagcagtttcataggtttacagaaaactgagcacatagtacagggagttcctttatacccactttctatgccactcacagttccccctattattagcatcttgaattagtgtggtacatttcttacaactgataaaccaatattgatacttattattaaccgaagactgttattatgaaccaaagcttacattatggtttagtctcctgttgtataataaatgtatgacatgtatccaccattgcagtatcatacaggatagtttcgctgctctaaaaatccctcatacttcacatcccttaccagtgattgtttcaaaagtggatcctgtggccaggtgcggtggctcatgcctataatcccagcactttgggaggccaaggcagaaagatcacttgagggaagtttgggcagtatagcaagaccccatctctacaaaaaattaaagaattaaccaggtgtggtggtgtgcacctgtagtcccagctactcaggaggctgaggtgggaggattgcttgagcctaggagttcgaggctgcggtgagccatgattgcaccactgcactccagcctggacaacagaatgggactccatctcaaaaaaaaaaaaaaatcaaaatgcagatctttattacagcaaaacatacctccaaaactgcagatcttctgtctctcccctcactcagcctcaccttgttccactatctagcattctgtttccaaccatacaggtctttttgtttcaatccctcaagccacactcaattctgtctcagagttttgctcatgttgtttttttcttcatgaaatgtcccattctacctcccggccccaactccaggtcttatcacagctgcctccttcctaaactgtgagctcctcactggcaaagctgtgttattgtacccatggtacccagcacctagtggatgtgtaataaatgtttgctgaataatattaataattaaattattagatgaagagaacaacagcacagagtttcacttgattgtgaggagcttgggaagggtactgaaagtttgcaatgacggctaggggatgaaagggaaggaaatgctgataggaaaaatgcctattcaataggctgagaacacagctaaaaatctgtagaggcggccaggcacattgctcaggcctgtagtctcagcactttgggaagccaaggggaaaggattgcttgatcccaggagtttgagaccagcctggacaacatgacaagactctgtctctataaaaagaaaaaagaaaaaaatttaattagctatgcatggtggtgtgcccctgtaatcccagctacttgggaagctgaggcagaaggatgcttgagtccatgagtttgaggctacagtgagccatgatcatgccactgcaccccagcatgggtaaaagagtaaaagtctgtctcaaaaaagaaaagaaaatttgtagaggcctcaacccatcagatggtgtcaggggagagcgctggatgaatagttacagtgataaagagtttaagatttgcagggtggaactgttctggtagtgacaaagtacagggtgtggccataggagtccactgaagagaactggaagtgaagacgctgagtatgaaaggtcaggaaactaagaagctgggtcattgagtgggtggcctacaaagtcagcaaaatctcccttccgcccaggaagaagaagtgagacaggtatttaagaaatatggctgatggatgacagagatgaaaggagagaagatgacaagttggatgtcatggacttcattggggcagaggtttttcatagggaagaaattgttagaagggtcttagggaactggaagaatgttgttgctaatgcctccctgtattgggggcatgaaagaataaatagcttctactcgaaagaagtacaggggaagtggtaacctcaggggaaagccaggtttcagttcagactagaaggtgagggagtttgcaaggtgtctggttgcacataacagaaatcagctccagctatctgtggccagtagtgagtgacgggttgagggagttgggtatcttggacagttgcacaagatggtagccacaggcctatcattatgggtgagaagatgctatgatggtcttgatgagctgggaagacactccaaaaaggtgtccactttagatagttctgtgaagaagttaaggaagtaggagaattcaccaacagacaggggttccataggacacaaatattaatggaatgtctggggaagtagagagaaacagaagtacagagaaatatggggattagaatggtctgtgggttccaagtggtggtatcaggaaggtggtatctagaatggtaggtacaggaggacctacaagcacatggtgacatttgtcgtgtctgtctagcccctattctattccaaatatctgtctgctccctaattcgtcttcatccattgaattagagtttctttcctttgtgtgtgtgtgggtgtgggtgggtggggggacagagtcttgccctgttgcccaggctggagtgcagtgatgcaatcatagctcagtgcagccttgaactcctgagctcaagcaatcctcccacctcacactcctgagtagctggatatacaggggcaccaccacacatgactaatttttttaaaaaattttgtagagatgggagtctcactgtgttgtccaggctggtctggatctcctggcttcaagcaaccttcccaccttggcttcccaaagtattgggattacaggcatgagcccggctgaatttgaatttctgactttctttgcctcatcccctttctttgccccagaacatctcttagagcttcactgtgccaccacgacttctgctacctccttaagaagctgcaccctggattatttcttaaacacccactgtgcgggttggatgctgacccagcctgctctactgagccctgtgaagcccccaccatcttctaacttaccatattatattgtaatatttttgtgtctctcttgtgttctaatctatgagtttcttcaagagcagacattatttcttgttcttatttacagtcctcccctgtaatgtctagcacattgcttgtgacccaggcagggatggacttgtcgaatgactgactgaatgactgagtgagtgaatggactttgatctcttattgtcctgttcctgtagtctagaaatgttagactcagaggtaccctctctggcaagactttccctttcttgcccacccttttatctgatttcctggttttgatttcatgcttgccagacatagaccatttgctgggctaaagaaacccagcttgagagataccctgtcccaattcttcctggcctgctcctcccaggatcctcctagaatatgggtctgagacatattgaatgttttctctacttcctaaaatgacatctctataatataggctgagtccccatccctgaacacttgggttagggccaggatcacctggtccatattccccagactgtcttttcccaccttcaacacatctaccatcctagcagaagggaagcccaggtttagtgaacagagtggctgagaagttacatggccatgataatgcctgatttcaggaaagggattacttctggaatagcagggagatgacatgagagcaggcacaggctacgggagcttcaactgtacgggtgatattttatttctaagatgggtacatactcattcgtgattccttaaatctcttttttttttttttttgagatggagtctcactctgttgtccaggctggagtgcaatggcgtgatctctgctcattgcaatgtccacctcccgggttcaggtgattctcctgcctcagcctcccgagtagctgggattacaggtgtgcgccaccaagcccagctaatttttatttttttagtagagatggtgttttgttatgttgcccaggctggtctcaaactcctgacctcaagtaatccatctgcctgggcttcccaaagtgctgggattacaggcctgagccaccacacctggcataaatgttttgtaatcctgaaacatttcaatgacaaagcttagaatgagaggtactcagcttttgccttagcagaatgcctgcaggtggacctggggatagagacagtagtggttaatggactctaggggtttaggggaattaaatcaaagtgttcagcagagagaggacaaaggggcagtagagggcttctgggctcagggccaacatcttggaccacaagtctataagctgagtttgactgactgtaaaagcctgtgaatctattgtattcactggcaaaaatcttcaaaataggcaatccccagcttattagtttatttattggtctgttgtctggaactgggaacaagttttcctatagaaacaatattacaaatggtggctctgccccaaggccagcccacaaaagctcacagaaccgtaatgtacctgaaatattgtactcataatactaaagatcctgaccactatttataaaagtgtttctgtgggaaagtgcatttcgagttttaatgccggtaacacatattcctcagccctgtgagtcctctggactcttgaccttactcccactgtgctgattcttatcagaatggcaccataagcgctggcaccataagcagcaggaaggcaagttagttgctttctgttgctacagaattcaagctgaagtttcaagcaattcatcttcactgagctgaccccaacccctaccatgtaccctggcctgtgatctaagtttagccttttaaacacaacaaagagcctcttatgcaaaacatgctttgtgcaccctatcccaagctgatacataaactctgtcacattagggactcaatttggatgtttctggaatgccaaagatgagcgggagtcttcgtttcatgaggaaaatggtctggaaaattttgggactagtaaaatccctgagacactggaaagggacagcttttgaagaggggcttgtataatcaagcggagaagtcacctgatgttgactgaaaggagatgaaaaatgtccctaaggaggccaggcatggtggctcacgcttataatcccagtgctttggtaggccgaggtgggcggatcacttgaggtcaggagtcacaacgccaggagtttgagaccagcctggccaacatggtgaaaccccatctctactaaaaatacaaaaattagctgggcatggtggcgaccgcttgtaaccccagctacttgagaggctgaggcatgagaatagtttgaacccaagaggcagaggttgcagtgagcccagatcataccactgcactctagcctgggtgacggagcgagactctggctcaaaaaaaaaaaaaaaagagtccctaagtttagaacactggtgtctttggcaaggacaagtatctctgagtatgatacagacactcaaatactctcacttagagagttcaggtggagaactgaaatctgaaagatccacatgacattctgggggcctaaaaactatgatttcttcatagacaaaagatattttctgttggctatgaagattgtaattgtaggaaactttctcactatatccagagccccagcctcagtggtagaggacaatgacatgtggtggtcctgttggcctggaggagtagcgaggattcaagattagagcctgggatagtcacagaggccgttgaaggacagcatgagtccctgggacgctcaggactagatccactttgggcagttggggcttcgagccctagtgccacacagggcttattttggtaaagcactctgattgggacaatacctttcctctatggtgtacagtcttgatgggactagaaatcaaactgccttgttctttcctagccagggagcgaggtgaacagactgtttccttagatttgaatcttagggctgggcacggtggctcacacctgtaatcctagcactttgggaggctaaggctgatggatcacttgagcacaggagtttgagaccagcctgagcaacatggcgaaaccctggctctacaaaaaaaatacaaaaaaattagctgggcctggtggcgtgcacctgtagtcccagctacctgcggggctgaggtgagaggatcgctttagcccaggaggtcaaggttgcagtgagccgagatcacaccactgcactccaccctgggtgacaaagtgaggcgctgtctcagaaaaaaaaaaaaaagatttgaatcttgaatggcacgacctagacactaaaagctggttggcacctattgtcccagcgttgtgcccccagccaccttaacctctagagttgcccggcttcctgtcctccaagcagactctctagctttcccatgagtcccatctgctacctattatcctcccaaaacagttctctcctactcaagtcatccagtctgtttctgttttgtatgattgaagaactctcactaatacagactctgatggcagaaggttgatcaaggaaaatctgccagtacaatttgtaaagcaactcaaagcctaaatcagcagaaggaatagttatagcatatcatcttcagatacaaaaatgacagttcatatctttcagatgtgatgagctcaactttacctgatatgttcacaatgtcaagttcaaatttaaaaaacaaaaaacaagcaaacaataaaacccttttggccaggcacagtggctaatgcctgtaatcccagcactttgggaggccgaggcaggcagataacttgaggccaggagttcgagaccagcctggtcaacacggtgaaaccccgtctctactaaaaatacaacaaattagcggggcgtggtggttcgtgactgtggtcccggctgcttgggaggctgaggcaggagaattgcttgaacccgggagatggaggttgcagtgtgctgaaatcatgctactgccctccagcctgggtgacagagcaagactccgtctaaaaaaattaaaataaaaataaattagccgggcatggtggtatgtgcctgtagtcctatctacttgggaggctgaggtgagaggatgggttgagcccaagagtttgaagttacagtgagctatgatcacaccaccgcagtccagcctgaacaacagagtgagacctctgttgtttagagtgagacctctgttgtttagagttctctgttgtttagagtgagacctctaaaaactattttttttttttacctgagaaggcaaagatggatgggtagagggaaggttaatataaatattattctgggaacaagttacgaattcctagccctgcatcatgcaatttactctgatgacatgataaatatgttggctgtattcaatggtaactatggttttgtctcatttattttgggaaataaatatattcatttatattaatagaaagatttttaggaaaacaggcaaattgcaattccattcctttgttatcatttaaaataactgagttaagattcaatggtagtttaaaaataacaatggagaaaaatgtgtctggaaatggccagttggccaaatgaagtgaagtatgtttcaattcaactagttggcattttcttttttttttttctctttttttttttttttcttctgagatggagttttgttcttgtcacccaggctggaatgctggaatggcgtgatctcagctcagtgcaacgttttcctccttgtttcaagcaattctcctgcctcagcctcccaagtagctgggattacaggcctgcaccatgatgcccagctaattttgtaggcattttctatttgctccatgattagcagaccgggtggcggagcttgtctgagaaagggcaggctactttgtccatcaatgcctggtgcaaagacatgccatctactgcaccggatgatcatctgggcctcaggctatgggacagcctgatcctcggcccatggagcagcctggtccttagtcacaggacatgtttcccatcccaggggagctcaggtttgtgggttccactcttgagatctaaacaacaatggactcagggggctcaggcagctttctctgatccagtttgtctctctcccacctgagttgaggccactgcagcatagataaaaactagggacactcaatgttcatgctgcctctcaattcttatcttccactggaggcccaggactcacccttgtcctggaaaaaccccattccttctcccctttgctatgtttctgccatcatcatagcgtgtgccttccctcaccctcacccccaaccaaaccctatctcacccatgatctctgtttccagagttctggctcagcacaagttggagcaaagtgcttttagacacagaagtgaagcagcttccctgttatgtaaatgggatgatacaatagatctggtgccatgtgacaaccctccccatatagtcccttaagaggcagaggcagagaccttaagcagctgtcattgaccccctccttttcgtgacagttttagtcagcctctccacctccttcttcccagccccagtgccctttatgataaagaaagggtatgggcctgggatgcgggaggtggagaggctgatttaagaggctttctgcctctatggaattaccacttctgagtcctctatctgagatctctgtctgctctgatttctaacttctagcacaggtctttacaaaataaaaacttcaaggagcctacaactttatccagatttggaaggaaaatgagagaaaaactgccttatagattggtaagtctaaatcatggcattgccttttgcctatgtagagtctcagtcatttaaggaatagcattgtgtgtgactttggggaggtcatatgtacctgcacaatctcctgaaatactttcccaatctgaacataagcccaggagccaggttccttgaccactggccaaagcgtcactccaagccaactccaagaattgggctagagagccccatggttatctacatcatggctgtaaactttgtacccagccaggtacaattattcctgggattcttacagccttctgcttttactaaaccaaaatttaccttctcaaaaggaagaagtttccctagttatagagttagataaagcactctagcagttgaagacttacttgtctctttcccagctttgacttacctggaagcaaaaagccctacaccattgaaaccaacacctttaacagtgcagcagggtcatatggccccaagataagtgatctgtggctcgggcaacagtcagtctctgcagaagaagctaggctggttgatatcaactagctgacataagaatgggttatcatttaccatggccaccttcgtggtctggaagcatcatctccaggtatccagcatcctgtagtaatgtgtttggaacattagagcctggtgctgttcagacagacctagatgaacacttaagtgtttggattttactatctcataaacttggcagtgaaatggccaggtgacttctctatttcaaaacactagggagtagaggaaacatttctattcttggaaatcctcctgtagctacaataaataaaagcaaaatccaaatgtctgcggttcatagtgcctagtacaggcacctagcatagagctagagtcacccaggagtaagtcgggacacaccatgagtcctctttacccagaccagtggctgtttttccacaagcagggagccctgtcacaagtactttgcctttccataagaatactgtaattctcacctcatatatctcagaaggaaaccctgctgatttagagcattaaatataagaagataacatcttaaaatactagaagaaaatatgatattcatcttgctcttaaagaaaaacattgtaatcattaagtcaatagaaaaaaatgccaaaataaataaattcagttacataaaagaaatatattagctacagcaagttatcataataaaaataaatgctggccgggtgtggtggctcatgcctgtaatcccagcactttgggaggccaaggcatacagatcacttgagatcaggagtccaagaccagcctggccaacatggtgaaactctgtctctactaaaaatgcaaaaattagccaggcatggtggtgcacacctataatcccagctactagggaggctgaggcgggagaattgcttgaacccaggcagtggaggtttcagtgagccaagatcacaccactgtactccaacttgggcaacagagcaaaattccatctgaaaaaaaaaatgctcagactctttgaactactaattttaagaatctaatcagaggccagtcacagtggctcacacctgtaatcccagcactttgggagaccgaggcaggtggatcacctaaggtcgggagttccagaccagcctgaccaacatggagaaaccctgtctctactaaaactacaatattagccaggcatggcgacacatgcctgtaatcccagctacttgggaggctgaggcaggagaatcacttgaacctgggaggcagaggttgcggtgagctgggattgtgccattgcactccagcctgggcaacaagagcgaaacttcctctcaaaacaacaacaacaacaacaaaaaactaatcagaaatgtgaatgtagttttgtgcacaaaagtatttatcataatgtaatttagaattggaaacaactgaatattcaacaatggtgaaagtgttatagtaatttatgatatatatagatgaaattcatggctcccatatgcagtcattaaaaataattttgttacataaagatacttatgagacaatggtaggtgtaaaaggcaaaatagggccaggtgcagtgtggctcacgcctgtaatcccagcactttgggagaccgaggcgggtggatcacctgaagtcaggagttcgagaccagtctgaccaacatggagaaaccctgtctctactaaaaatacaaaattagctgggcatggtggcaggtgcctgtaatcccaactactcgggagtctaaggcaggagaatggcttgaaccatggaggcggaggttgcagtgagccaagattgtgccactgcactccagcctgggcaacaagagcaaaactctgtctcaaaaaaaaaaaaaaaaaaaaaggcaaaatagcaaactgaataaatcataaactacatttttaaaataaaattaaaagaacaattaaaggctgaaacagtggctcatgcctgtaatcccagcactttgggaggccgaggtgggaagatcccttgagaccagcctgggcaacatagtaagaccccgtctcttaaaaaaaaaacaccaattaaaattgatgagagtagaaataatttttttgttttattctttatccttttctatattttctatatttttgcagcccaataaatgtttttaaaatcacctctgaacttttactactagtgcttttttttctacaactttataccataatgagatttctgatggtgcacaaagacctgcagtttatataataagtgacaaatcatttttactcattagataattgcatattaagtacctttgtgttttaatatctattatcttagaggataactgagttaatcagtagagtttactttagactgaaataataattgtacagtttagtctgaatgacttcaacactttaagcagacccctcccagatggcagcctgcaggacagatggtctgtcaaaggttcctggcctctgctacctttgtcttgggtcatatctctgggctccatcctttatctcactctcttggccatgtctgacttccgtataggttcttcaactcaaatcaggttcctaatatccccagcgctcttgtattgatgtcttaacacttcccttcttctagcagggcgtggtggctcacgcctgtaatcctagtactttgggaggccgaggcgggcagatcacctgaggtcgggagtttgagaccagtctgaccaacatggagaaacccccatatctactaaaaatacaaaattagctgggcatggtggcgcatgcctgtaatccgttacttgggaggctgaggcaggagaatcgcttaaacccaggaggcggaggttgcagtgagcagagatcacaccattgcactccagcctgggcaacaagagtgaaactccgtctcaaaacaaaaaacaaacaaacaaacaaaacagttccctgattcttcagcttgatccctttgacatgatagtttgagactgcaacctagaccaagaccatgtagagaatttcctgaggctcagtgtttgcttagagtcttgtcccaggtctccagagttcctgcctggcatggcacccccaataagctagtaaggcacctgctccttgattggtcctccttgcttaccctagctcagctagttctccaagaacagtcttctaggccagttgagaatgtgtctgggccagctccccatcctgaggatctggcaccctccggtggccatgggtgggtgcacctagcctagcagtgagtttcagtgctagagcctgctaaaatgtccccaggcgtattagcaccctccagtgacagtttaatggagctacttcagagagctgctatcagatcctggcatgccttacttctgcagggtcccttgtaattcaattcacctcctgcaacttgctgatgtatcaagatagactaagatctatgttcttaaaggagaaggcttttgaggttttgaatttggcaggaaagtcataagtactaacctgaatgccagatactgaactaaatgctttataaacattatcataaataatcttcacaacaaccctggaaggtaggcacctatttttcatctccaccctctagaaaaggaaatcaaggctcatggggttggggggcggttatatagaagtcaaggttaagctaaaaggccaacagttccctgttagttgatggcttagcttgggtttaaaaccagctcaacctgactcaagctgactcaggtcctatgctttaacaagccatacagtctctttaggacattgggatgctctcaaagatcatcatatatatatagaagttagtctgtatgaagaagaaagattttttttcccccgagatggagtcttgcccagtcgccaggctggagtgcagtggcacaatctcagctctctgcaggctccgcctcccgagttcaagcaattcccctgcctcagcctcctgagtagctggggctactggagtgtgccaccatgcctggctaattttttgtattttagtagagacagggtttcaccatggttttaccatggtctcgatttcctgacctcgtgatctgcccacctcagccttccaaagtgttgggattacaggcatgagccatcacacccggcctaatttttgtatttttagtaaagacggggttttaccatgttaaccaggctggtctcctggttaaccatgaggtctcctgacctcatgatctgcccaccttggcctcccaaagtgctgggattacaggcgtgagccactgacctcagccaagaatttttcaaagctgggcatggtggcgtacacctgtagtcccgaggtacacgagaggctgaggcaggaagatcccttgagcccaggacttgaaggctgcagtgagctatgatgagtgccactgcactccagcctgggtgatagaatgagaccttatctctgaaaacaaagcaaaacaacaacaaactaaacttataaaaaaatatgtagagagaagcagagacaagagttagagctagagtcctgacagggcttgagctctcggttctagttgttcctgaggcccaagaataccattgtccttttccagacttggttttttcatcagatactccagcccttccaataaattcccctttatagaccagtttgatgtggctttctgccacttgtaatgtaagagccctactaaaacaggaaagaagtaggggactttggaatacagtctacgtactaacacccacagcagcattagacaggatactgatgatccacagtctgatccacactgttattttggttgcaagaaacagacagtcaatttactagagacaagttactcattactcaaagacaattcaaaaggatggttcataggaaaaacaaatgtgtaccacaccctgagtcaactgaacctcacagcgttggaaaggattggaactacagcagtagcactagggaacagccactgcctcctttctctagggcttttttttttttagatggaattttattttgctcttgctgcccaggctggagtgtaatggcacaatcttggctcactgcaaccactgcctccctggttcaagccattctcccgcctcagcctcccaagtagctgggattgtaggcatgcaccactatgcccagctaattttttttatgtatttagtagagacagaattttaccatgtttgtcaggctggtctcaaactcctgacctcaggtgatccacccgccttggcctcccaaagtgccaggattacagacataagccaccacacccggccctctaggggctttttaacctctcagtgaatcagcaccaccctctctggaccagccttttcagcttattcccgttgcccctggctgaaaaaaaaagaaaaaaaaaagccactctagctcccgaagctctgtggcttttcagtttcagctcataaaaaatcaaagctttcctttgtgacactttattgtgagttcccaagagggaagatttgacttctgcttaactttttaaaccaaagctcaagaggcataggtcactggatacagcttaaggccacacccgtggaccaggtgaccaattcgctgcagtcatggtcatgtggcccattgcccactcagtaagttgagtgggtagggattttactccaaagggatatggggaaggccagtaataattggcatctctaatcaagcctacttaattgtaattttaactcttgccagtaagaaaaattaaacacgttgtaaacatgggcaacctattccccaaagaccctctctaattatctagttggcaagaggactcaccttctggtgcttgtaggcatgtgtgtattctctaactcaaagtgcaccttcttcaagtccccagtctcgcctgcacctgccttaaacactgtgcagtgagctagactactccactcacttgggagtctattaattttttttctccccttaaccacactaaagactttgcttagtaaagcattttgaagatttagaaagtgacagctcagtctgcttaggatttatatcccaaacagatgtgccaagaagtcataggaatcaaactgctattctgtgagtagaataatatattaacttgccttttagtagtttcgattacacagctgtacaaattgcaatggagtcttcatagctaaagttgcttttatcaaaagcacattgcttcttcaaggtggaggttttagcatagcaggcaccctgggggacatgcatgcatccttataaaatactgctcattacttgcaataaaatcttccaggtagttgagatatggtagttctgaattcaccttgaggaaccctctgcccttcatcatcagatatatatatataactgtatattatttcacagtgaaaataaggagttcctcaataatggtaccaacatcttacactttggtctctgtgactctcagtattctcgactgtcaaattgggatattgatacccatcttacagggttgttgtaagtagccaatgaaacaatgtttataaagagcttagcagctgggcgcggtggctcatacctgtaatcccagcactttgggaggccaaggcgggtggatcacgaagtcaggagattgagaccatcctggccaacatggtgaaaccccgcctctactaaaaatacaaaaattagctgggcatggtggtgggcatctgtagtcccagttactcaggaggctgaggctcaggagaatctcttgaacctggaggtgaagtttgcagtgagcagagatggtgccactgcactccagcctggtgatagagcaagactctatctaaaaaaaaaaaaaaattatactaaaggaagaatcctccacaacttttatccaataattgttacttggctagaaatattgtgtgaacatctatttttggtaacctggaaagctggataaagggcccattagctaagatatattaaatcttgatttgaattacaactaacatacatttttaattttttctagggtttcatgaaaggggtcaaaaattttttaaaaagtgagttcaaacaagaacgggaaacaataagcataaaagtcggaaaggccagtaccagccagtaccagtcctagaacaaggagactaagcttggaagtgcactgcaaggtgtggcaattacacctgagtcattgagcctgattctgcaaagggagcttcagagatccctgatcaattttatctgagagctccctacagaatcaaatgcaggtactctctggaggaaagcaactctcagtgcgtgtccttgggatttccacaattaagttaaataaaatataagctcacaattaagaaaaaaatcattggaatcactggctgggcgcagtggctcatgcctgtaatcccagcagtttgggaggccaaggtgggcagatcatgaggtcaggagttcaagactagccaggccaacatagtgaaaccccgtctctactgaaaatacaaaaaattagccatgcatggtagcatgtgcctgtaatcgcagctactcgggaggctgagtcaggagaatcacttgaacccaggaggtggaggttgcagtgagctgaggtcatgccactgccctataagacatcatgagttaggatgaatagaaacaacaaacaataaatttgtatctgtaagaaatgaagaattggaatcagaattgtcatatacagattattaagtaagatttatgaacaacttaaagaaaccaaatatggaatgaaatagagaaagaagcaaggaactattaaaatgaccagaaaaattagaaaaagaaccaaatagaacttttaggaccaatatatatagattttgaaattagtgactcagtgaatgtgttaaaaatagaataaaaatagctaaagacagaattagtgaccaggaatttatatctgaggaaatcacccaaaattcagcacagcaagttaaaaggcatggaggttaaaaggcatggaaggcagaacaaaatttaacatatgtctaattagagttccaaagggaaagaatagataggaaaaaggcaatattgagaagtatcagttcaaaaattttcctgaggccaggtgcagtggctcatgcctataatcccagctctttgggaggctgaggcagttggatcacctaaggtcaggagctcaaaacgagcctggccaacatggtgaaaccccgtctctaccaaaaatacaaaaattatctggatgtggtgatggacacctgtaataccagctactcaggaggctaaggcaagagaattgattgaagccaggaggcagaggttgcagtgagctgagatcatgccactgcactccagcctgggtgacagaatgagactccatctccaaagaaaagatttactgaactgattaaagatgaatccatggacaaagaaagcacagcacatatcaagaatgacaaacagaactctacacctagacatattgtgatgaaacatcaccaatgccaaaaattaacaccttaaaagtcccagagaaaaaaagccagagcacctaaaaagaacaaagaagctaccagaagacttttttttaaaaggaaacataacaatagttatattagtgctcacaatagccctacgtagtaattactattattgtttctattttaagataaggaaactggctgagagagaaagcccaagggcctacagatatacagcaacaaggatgtagcttagaaacacaatgctgagaggaaaaagcaggtaataaaacactgcttcagccatatgtaacaaagttgatgaatcttagaaacactgctaagtgaaaaaagcagacggcaggagattgcatacagagtataatttttataatgctcacaaacaaaactaaataatatattggttagaaatactgacatgcggcagggcgtggtggctcacgcctgtaatcctagcattttgggaggcctaggtgggcagatcacctgaggttgggagttcaagaccagcctggccaacatggtaaaaccccatctctactaaaaaatacaaaaaattagctgggtgcagtggcacgtggctgtaatcccagatacttgggaggctgaggcaggagaattgcttgaacccaggaggctgaggctgcagtgagccgagatcatgccacttcactctagcctgggctacagagcgagacttcatcccccccccacaaaaaaaaagaaagaaagaaaagaaaagaaaaaaagaaatattgactgtgcatgatgaaattacttttaaaatgcaagagtgaggctgggcatggtggctcaggcctgtaatcccagcacttttggaggcccaggcaggtggatcacttgaggtcaggagtttgagcacagcctggtcaacatggtgaaaccccctccctactaaaaatacaaaaattagctgggcgtggtggcacaagcctgtaattctagctactcaggagaatgaggcaagataatgcttgaacacgggagatggaggttacggtgagccgagattgcgccactgcactccagcctccagcctgggcgacagagcaggaacttgtcacacacacacacacacacacacacacacacacacacacacacaaagcaagagtgaaatactcaaaattcaggatagtggttacctcttgacaagggggatagaagagtgggatagggagaagaacaagaacaaggtaaaaaggcaaaagtaatgttctagttcttacactgggtggcagggaacagggactcattttattatatttcacatttacacatcacctgtattctttcatatgcatcaaatgtcacataaaaaaataaaataaggctgggagcagtggctcacacctgtaatcccgcactttgggaggctaaggcaggcagatcacctgaggtcgggagttggagaccagcctgaccaacatggagaaaccccatctctactaaaagtacaaaattagccgggcgtggtggcacacgcctgtaatcccagctactcgggaggctggggcaggagaatcgcttgaacccaggaggcagaggttgtggtgagccaagatcatgccattgcactccaactccagcctggtcaacaagagcgaaactcagtctcaaaaaaaaaaaaaaaaagaaaaaagaaaataaaaataaaacaaactaccaaaggactaattttaactggattcctaaaacatacatttgaaaacactggttcatccttctgattgatggttgagggatataatcagactgtagaacttaactgccaattttttgtagcaaatcttgaaaagccttgctacataatttttttctacaaaattattaaaagctttatttaccactggaatcattcaacaaaaagcaaaagcaaatgagcctgaaaaaggagctaagcaattactacctagggttgtcatgagcactgataaactatggttatatttccttttttttttgattagttgaagacaatgatgcaagtcattgctggcctgggattttaaatcactgctcttgtatgttctccccaaatggaatggtctattcatacagctttaataacaggtatgctattcacatcatttgaatgggtatcttcaagtttatattccagatggcaaaaaaaaaaaaaaaattctacatagaaaaaaatatatttataggacaactgcattaggaataattagtttcattttgcatttggtgtcatgtaattaaagttggtaataaatgaaaaaagttggtgtcatttttttcttttggttactgtcctgctaaaatattacaaaaagtcaaattaaaaacatataacaggccgggcgaggtggctcatgcctgtaatcccagcactttgggaggctgaggcaggcggatcaagaggtcaggagatcgagaccatcctggctaacacggtgaaaccccgtctctactaaaaacacaaaaaattagccgggcgtggtggcgggcgcctgtagtcccagccactcgggaggctgaggcaggaaaatggcgtgaacccggtgaacctggcgaacccgggaggcggagctcgcagtgagccgagatctcgccactgcactccagcctgggtgacagagtgagactccgtctgaaaaaaaaaaaaacaaccatataacaaaattgttttcttttggtggtaggattataaataacttcactttttggccaggcatggtggctcacgcctgtaatcctagcactctgggaggccgaggcaggcaaatcacctgaggtcaggagttcaggaggtcaggagttcaagacccagcctggccaacatggtgaaaccccatctctactaaaaatataaaaattagccaggcatggtggtgggtgcctgtaatcccagctactcaggatgctgagacaggagaattgcttgaacccaggagacagaggttacagtgagccgacacagtgccactgcactccagcctgggcgacagagtgagactccctctcaaaaaaaaaaaaattcacttttctcatatcaatattttatgaaccaattagttcagttttaacgtaaataaatacacctggttttcaatcatagtaagagatttactcaataaattctacatgaatgtatttgtactggactgaatttacatattaatcaagttcgaattgcttttctagatcaattttatgcaaatatatttactactatttaaatatttttcttaatagaaagtgcccaaatgaaaatcactaattaacaattaggaagcaaaatcaaaattgttagatattttcacatttcatcttagagaaagaactctttgaaatggtattgtcttatttttcaatccttttaataaattaaaaattactagactaatttaaaatgatttttcctattacctgcatttccttcatactttaatagtttataattgtcattaaaacatctttggctgggcatggtggctcacgccaataatcccaacactttgggaagctgaggtgggtggatcacatgaggtcaggagttcaagaccagcctggccaacatggtgaaaccatgtctcttctaaaaatacaaaaattagctgggcatgatgacacacatctgtaatctcagctacttgagaggctgacgcaggagaatcacttgaacccaggaggcggaggtttcagtgagccaagatcgtgccactgcactccaggctggtgacagagtgagactcctctgtctcaaaaaaaaaaaaaaaaaaaaaaaaagaagaatccttatacacatatttatgctgaactacctggtaatatagataataattcattccattgtattgggcccagtgattctcaactaatcttcttgatatcttactgatgctatggtattaagaatttctttatacatgaacgcaaagaggggaaaaacagacactggggcctacttgagggtggagcataggaggagggagaggattaaaaaaataactattgggcagggtgtggtgcctgtaatcccagcactttgggaggctgaggtggacagatcacgaagtcaagagtttgagaccagcctggccaacatggtgaaaccctgactctactaagaatacaaaaattagccaggcgtggtggtgggtgcctgtaatcccagcgctttgggaggctgaggcaggagaattgcttcaacctgggaggtgaaggttacagtgagccgagatcgtgccactgcactccagcctgggcgacagagcaagactctgtcttgaaacaaacaaacaaacaaaaaaccaaacaaaaactattgggtactagacctagtacctgggggatgaaataatctgtacaacaaacccctgtgacatgagtttccctatataacaaaccttcacatgtacccctgaacctaaaataaaagtttagaaaaattttaaaaagcacttatataaaaaaaagaatactttcgttaaagaaaggtacctaaacaagcttaatattacttttgcaaataagatttcaagactcaatgagcacatcaaggaaatggcgtccgttagagaagcctaccccttcctattgggggtttcagaggttacacagtgcaactaggtttaggtgataaatttaaaaagcaaaaggatgttaatgtagcagctctctgcaatataagtaatatctgtatctttgaagcctaatactgaaaccagatgctcagttttatgacttccttctctcaaatgacaagataagaagaaaaacatatataagtcagttagtgttatcaggaagtgattattagttttgctgaaaacataatgcctttggggctttgaatgaaagtactaatttaaaccattcccaaaatgaataaatattcaaatgaagtagtgcataaactttgcttgcctaggactaacataagtatttgtgactctatcatgtgtgttctttggaatttttctctttcatctgaaaaagtctttcacctggttactcttttggaatcaaatttagacacaatgcttggatttttccctatgtataataaatcaattaatgcaactcctttccattaagaacagtccactaataactgagtgagcatgctttaaattaacctgatattcaagagcctgctaagttttaaatctatggattaaagttttaccatatctaaatctatgttttgtaagagttactcaaagcgtatacattttataattaacattttagcaacatcaggattgaaattagtgtcttacaagaatctgtaagctcctcagaacaaggactatatctttcatatctttttgctccccagaacgtctgctggggtgagttggagagttgtttagtagtgaggggagttggattaataacagtaatgggacaggtaggccagaagggaagagacgaaacagcatggaaagtatgtgatttcagacttagtaaatgggcagagcccagggctaagaaaacatggaaaagacatgtgggcaaggatgaaatataattttgttcatctttaaatacagttatacgtaaaatacagacattggcaaatttcccgagtcccactcttctggggctatgtggatttcagtgagtcaggatggcagtgagcacagatggaggaagagacattgctgttaggtaaaggtccatcattcagttgctcgtgtccatatcttattagtgaagtgcatgtgtgtgtatctcaaccacaacttctggtgttctgggaatgtacatttattttcctatgatactaagtttctattacaggtttccattctatcaagtgcatcaatcaggatgtggaaagaaaacagaaaggtcgagtgcggtggctcacgcctgtaatccaagcactttgggaggccaaggcgagcggatcgcctgagaacagaagtttgagaccagcctgaccaacatggtgaaaccccgtctctactgaaaatacaaaaattagctgggcgtggtggtaggcgcctgtagtcccagctactcaggaagctgaggcaggagaatcgcttgaaccccggaggtggaggttgtagtgagctgagatcacgccactgcactccagcctgggtgacagagcgagactccgtctcaaaaaacaaacaaacaagcagaaaacagaaactgctgcaaatgtttcaggcaggaagggatttaatatgaggaataagatgtttatcactctttggaaagggctgggagagcaaaggtccgggaaaaccaccactaatctgaggaaataaggaagttgcagaaatcttaaaaagctatctcagctgcctgcatagtcaaagcagagggaattcagcaagacacccagaagccactgtaaaatgttcacagaggcccacgtgcctttgatgttggaggaacaatggtggcttctgcttctctttcacctttcaaaccttactggaatgcctcccattgactgaatctaaacaaggttgttatcaggagagcttggggaaagtagtcactacaagtactgggagtcttacaagaatagagatgcttacaagaatagagatgtttctgagtaccaacagacaatatctggcacatggtggaaatttaatctcagttaattcaatgatcctttactctttccctgggtaacaaatgagttctgggcgatgtatgtattgtcaggcactgaggcagtgggtggaagggagagcgtattcagtttttatgggacctgaagtttatgcagctggggaggagggagtctattaaaaacaattaaaaaaatacaaaatgagatgcaaatatgaatttttatttagaatgagaaaaaaaccaccacaaaatatcaaaacatgatatttttattatggtgtttttcagcttcataattcataattggtaatgtcatgtaaatgtttagaattctccagccgggtgtggtggctcacgcctgtaatccagcattttgggaggttgaggcaggcagatcacaagatcaggagttagagaccaggctggctaacatagtgaaaccctgtctctactaaaaatacaaaaattagctgggcatggtggcacaagtctgtaatcccaactactcaggaggctgaggcaggagaattgcttgaacctgggaggtggaggttgtggtgagccaagatcgtgccactgcattccagcctgggcaatagagcgagattctgtctcaaaaaaaaaaaaaaaaaaaatttagaattgtcaagtctggtaaaacttctaccaagtatttttcatcaagtagctataagatttttgaaatattaatctcaatttttgaattgattagctgattaaccagtttatcgtcgatgtcctcattgcagtcatacaagttttaagctatttttctcaatgttggcactttgtgtcatatctgagaaatttaaatgttttggctggtctgagtgcagtggtgtttacaactaattgatcacaaccggttacagatttctttgttccttctccactcccactgcttcaattgatcagccttaaaagaatttttttttaaagaaatttaaatattttccccaatgtgttcatatgctctatttctctttattaattggatggtcaaaacaatccaaaagtctattacctttctttgaaatttagcttggcctgttaatgaatcattgctttcattatgatttgagatttatttttgttataatttacttcttggtacagaatcacgtccatttatttcattgctgatctttatcactctgcttcatactttattaattttttcataactgtaaatttttattggaattttctttcatttctttaaaaaacacgtttaaattaaaataaaaattagccaggcatggtggtgcacacctgtagtcccagctactcaggaggctgagttggaaggattgcttgagcccaggagtttgaggctgcagcaagctatggttgtgccactgcacccgagcctggatgacagagcaagtccctatctccaagaaaaaaagaaagaaaggaagaaaggaagaaggaaggaaggaaggagaaaagaaggaaggaaggaaggaaggaaggaaggaaggaaggaaggaaggaaggaagggaaaggaaaggaaaggaagaaagaaaaagaaagaaagaaaggaaggaaggaaggaaggaagaaggaaggaaggaaggaaggaaggaaggaaggaaagaaagaaagaaagaaagaaagaaagaaagaaagaaagaaagaaagaaagaaaagaaagaaagaaagaaagaaaatatttaatttaatgattacaaaacaggtgtttcccaggctggaatgagttgcaatctcagctcactgcaacctccgcctcctgggctcaagcgattctcctgcctcagcttctgagcagctgggattacaggcatacgccaccacacttggctaatttttgtattttaagtagagacaaggttttaccctattgcccaggttggtctgaaactcctgggctcaagtgatctgctggccttggcctcccaaagtgctgggactacaggcatgagccaccgtgcctggcaggaagtatatcatttaactacattttaactacaataaagacgttttgaaatgtttcagtggctgggtgaggtggctcatgcctgtaatcctaacattgtgggaggttgaggtgggcagatcacctgaggtcaggagtttgagaccaaccagggcaacagggtgaaaccctgtctctactgaaaatacaaaaattagccaggactggtggcacacacctgtagtcccagctactagggaggctgaggcaataggatcgcttgaacctgggaggtggaggttgcagtgagccgagattgcgccactgcactccagcctgggtgacagagcgaaaccctgtctcaaaaaaaaaaaaaaaaagaaagaaagaaaaaaaaaagatatatttccttttctttttctttttaagatagaatagttctctgtcaccaggctggagtgcaatggctcaatctcggctcactacaacctctgcctcctgggttcaagcgattatcctgcctcagcctcccaagtagctggaattacaggcatgcgccaccacacccagctacttttgtatttttagtaaagacggagttttgccatgttggccaggctggttgcaaactgagtgaaacatcatctcaaaaaaaaaaaaagtaattaaaatttaaaatatgttatcttgccgtactagtatccactttttcctctcctaacttgcccctctgcctttctgcacattatcaaatgggaacggggtaggctcccgagcatcacagctccctcttctcctgcatctatattaagtttcctttcctgccctaccccagccatcgccaccccacttgaacctgctgcttgttcagtatctatgagtctcctactatagccccttgaaagaaatgacacccttgggaagcgtttccaaggtacaaatccagagagtcttgtaaagaaatccaccaggcatattataaaggtacaactgttgcaatcatcctactctctttctccctttcttttcatccatgtctctctctaattcactccatcttcagttgggtctgcagcttccacacctaggctgagaggtcacagaagcagagtgtcccacattctcaagcctctttgtgatgacagcagcagctgggaaggctagtgaggcatggcagggaaattaggagagaaatggaaactctagaccaagagagagcaggtggttttttgtttttggttttgctgttcattgagaggctcttccccagattttgaggttctgggtgccctcttattttctgcaggacaatgataatttgtcatcataccatacctcagccttaccttctccacagttcctctgtgtctctcaagatccaccttcccaatctctcactctctttttttttttcagacggagtctccctctgtcgcccaggctgaagtgcagtggcccaaactcggcttactgcaacctctgcctcccgggctcaagtgatcctcctgcctcagcctccccagtagctggggttaccccatgcctggctaatttttgtacaaaagttctattcttatatgaaggctcccatccctatggctcagccttcaagatccaactgaaagaacgcatcatcttcaaaccttccaagattctttaaaaaaaattttttttgagatgaggtttcactattttgcctaggctggtcttgaacttctgagttcaagcgatcctctgacctcagtctgctgggattacaggcataagccactgcacccagccaccttccaaggttctaaacctctccccacctcacctcacctcaccttcactattatttcagctggactattccccacccctgagtttcttggaacatttcatttacccttctgttacagcaccgatcaccttgagccttgtggcatactttaagcggatgcctcattgcccttgacagaggtgggtgaccaccagctgggcaggatccctgtctggtttatacctatgcccgctctccccaccggcacctaacacagtgtcctttccattgcagatgtgtgataatgtactctgagtcaacctcctggcccttactccactacagttgccttcccctagagtctggggctctgcgtgtgctcatttcaactcccttgcctacttggaacctccctctgcccctctcctgtcctttcctgttcttttctgccacagtttccatcttccacccctgctgccctgcctggtctcctagttaaaggagccggcaatgctcctttaaagacacgcccttttggcctggcgtggtggcttatgcctgtaattctagcactttgtccggccaaggtgggcggatcacttgaggtcaggagttcggaaccagcctggacaacatggtgaaaccctgtctctactaaaaatagaaaaaaatagccgtgcatggtggtgggcgcctgtaatcccagctacttgggaggctgaggcaggagaattgctcgaacctgggaggtgtaggttgcagtgagccgagattgcgccactgcactccagcctgggcaacaaagtgagactccgtctcaaaaaaaaaaagaaaaaaaaaaaagataagcccttttgcatggtggctcatacctgtaatcccagcattttgggaggctgaggcgggcggaccacttgaggtcaggagtttcagaccagcctgggcaacatggtgaaatcctgtctctactaaaaatacaaaaaaattagcccaacatgctcccttgaacccaggaggcagaggttgcagtgagctgagatcgtgccactgcactccagcctgggtgatgcagtgagactttgtctcaaaaataaaaataaaataaaaataaagcaatgatatgcccttttggcagttgtgaactctccttctacctcctgctcttcctgatgtttacacccttagctctgctgatatcggctgctctagaagtttgcactaaccagatttcacctgttcaaaatgataggcaggaagacctcaaacctcaacttgctcccaggctcacccagccctaggaaggactcttcttggaactgagcccaacattaataatacggtaaaatggggaggcaagagtagcacctgccttataatcatggtacattagacttttaatgtaggtcgtttttcttgtgggaggcaagatctaacttgttctacatatgaatccatgtaatgataagctgtgatatactgtaacttacatttacccttttgctgatctcaaaatactaaacttcaaagaagaaaatatgcctgtgaggactgaatagtctgaatttttctaatcaatgaaacacacacacacacaaagagctttttagagaaatttttctaaacatgactctgctgtaattagaggaaaggtgtacctgtcatgttttaccaatgagattcttgggcttaaagaggtttgctgtctggttcaaggtcctaaagaaagtaactgaatctgctccactgattcagtacaatgaagagttcaaacaaggtcctacaaaatgatctcctagccaaattctcagtttcttacatatgatgcctaaattccccttcttaggaagaacattgacaatgtgatgtagggtaagttattataatggaaatcaacataactatagcagatcataccagttgcctaccccaagtacattctctccttcttccttgctacttccctacttcctttattactgagggcatcaatgcacccagctaaaagaccagattccctttaaaactatatggcctcagccgggcacagtggctcatgcctgtaatcccagcactttgggaggccgaggcaggcggatcacgaggtgaggagttcgagaccagcctgaccaatgtggtgaaactccatctctactaaaaatacaaaaattagctgggcatggtggtgggtgcctgtaatcccagctactcaggagtctgaggcaggagaatggcatgaacctgggaggcagaggttgcaatgagccaagattgcaccactgtagtccagcaacagagcaagactgtctcagaacaagcaaacaaacaaaaactatatggcctaatgactaaattctgaacaattagataaaagcagaaatgttatgaaggacctggggacagactccatagaggtaaacttaatcagctgggagatgtgatccttttgcccttccccctttttttctgccgggaatacagatgtgatggctggatttccaatagccatcttgaaccatcactagctatacactagaatggttgatttgtaagacagaaggaacccgggtctaataactgtgaggctaccaaaccagccctgaacacctcatccatatgaaagataaatgaactaccttagttatgccatttttttaaaaaaactttagattcaggggatacttgtgcaggttcattacatggatatattacataatcatggggcttgggcttctagtatacccatcacccaaatagtgaccatggtacccaataggtgatttttcaaccctcactcccattcccaccctccccccatttggagtccccagtgtctattgtttccatctttatgtcaatttgtacccgcttttagctcccactcacaagtgagaacatgcagtatttgattttctgtttctcagttatttcacttaggataatggccaccagctccaaccatgttgctgcaaaggacatgatttcattctttttaaaatccattgttattttacattttcaattatatgcagctgaatctaatcatgactgacaaaataaacaggcctagtaacacatttttattgagttttaaatggacaaattaggaagtacttaaatatttttctgtctgtcaaatacattattaaatgactataagcctgtctattttaatttttaaataatatctattcccggccgggtgtggtggctcatgcctgtaatcccagcactttgggaggccaaggcgggcagatcacatgaaaccaggagtttgagaccagcctgggaaacatgatgaaaccctgtctctactaaaaatacaaaaattagccgggcgtggtggcatgtgcttgtagtcccagttacttgggaggctgaggcaggagaatcacttgaaccagggaggtggaagttgcagtgagctgagatcacaccactgcactccaacctgggcaacagagcaagactccatctcaaaaaatatatataataataataataataataataataatatcctttccctttgcgggtgtagtgactgtaaagaggcacaaggaagttcctgggatgctgatactgtttgtttcttcatcagatatgttcagtttgtgaagatgcactggctgtatgcatatttgaagtattcatatttctctctatatatatattatacatcaataaaaagtttcaaaatatactcattgtaaatttatctttttgagcagaactaaccagtttaggtaggattaaagattttaaaaggctaaatactctgagaattgtgaagattaaatgaataactaatgaaaaatgaatggaaattagttttaaccgatttatttattattttttattttttttgagatggcgtctcactctgtcccctaggccagagtgcagtggcgcaatctctgctcactgtaagctccgcctcccgggttcacgccattctcctgcctcagcctcctgagtagctgggactacaggcacccgccaccacgcctggctaattttttgtattttaaattttagtagagacagggtttcaccggattagccagggtggtctcgatctcctgaccttgtgatctgcccgcctctgcctcccagagtgctgggattacaggcgtgagccaccgtgcccggccagttttaacctatttagttacgcatccgtgaaaatttctggagaacctactattcatcaggcactcagctattactcttggtgctaacctaattgtttgccaatttttgtttcattcctcccactagactataagcttcatggggacagggactaatctgttttgttcctgttgcacacacagttgtctaacactaatctgttttgttcatggtgtacacatagttaacacagtgccaggcaataaatgtaatggcttttaatggaatgaataactgagttaatatattataggttaaataacctcttgtggaccactaggaaactggatttcaagttccaaaacaactgattttcatgtgatcttttggaattcatttgtaaattatgggcaatctatggctcttcagcatcaatattcaatcatgaagtacaagtgaaatttcaggtgattctcttaaagcttaggaaattatagtgtctaaaacataaggctagctgcggtggctcacgcctgtaatcccagcactttgggaggccgaggcaggcagatcacctgaggtcaggagtttgagaccagcctgaccaacgtggagaaaccccgtctctactaaaaatacaaaattagctgggcgtggtggtgcatgcctgtaatcccagctactcgggagtctgaggcgggagaatcgcttgaacctgggaggcagaggttgcagtgagccaagatcgtgccattgcactccagcctgggcaacaagagcaaaactccatctcaaaaaaaaaaaaaaaaaagggccgggcgtggtggctcactcctgtaatcccagcactttgggaggccgaggtgggcggatcacaaggtcaggagatcaagaccatcctggctaacatggtgaaaccccgtctctactaaaaatacaaaaattagccgggtgtggtgacgggggcctgtagtcccagctactcaggaggctgaggcagaagaatggcatgaacctaggaggcggagcttgaagtgagccgagattgcgccactgcactccagcctgggtgacagagctagactcagtctcaaaaataaacaaataaataaaataagattaaaaaataaaagggtgaaaatcataatgcaattatcacaagaaactgtcaaaagcccttaactacactagttaaaaagagtggaacagattaacttcttgatatcataatgaaaaggcaaacactatgactaacacacaccatatcaaaatagaacattttcgttgcatggcaagaaagaaaagatgtctgtgttttaagcaatcaaagaacaaaattgaaaatgcaagcaactggaaaatggcagtccctagaaattctctgttaaaatacagtaaacatatgactataaattttcaatataatttaaagcattctccttggtaggttaaaaaaattgtctagattcaaaaagagagaaatatcagtttaacatctgtaggagtcttattttgggagtgcatactcagccccccatcctttctgtggaaactgcctcttgacaaaagggcaagcctagacagtcatttttgtcaaccactcctaccatggtgtattggacaattgaagatgtcttcacctaagctgaaccaatgagaatctttatcctgagaaccttaatcagaaagccttaagtctgtaggtagtggtgggctctagaactggaaggccaactagagttggaactgaggttggcactacggctaaccaaagtttaacaaaagccaaaattatggggaagcagaaagtataaataatcaaaggaagcccacttgaaaaaaaaaggaaaatggaatatatatgccaacaagagcagaagcaaaagatgctggttgaggggcatgatagaaaaatgagttctgttcttgaattttcggtttctgtgaactctggctgactttcttacttttaaaatcattcaggtaattaactaacactcctgtccctgcccagttgccccaattctacattttttgagacagagtctcactctgttgcccagactggagtgcagtggtgcaatctctgctcacggcaacttctgcctcccaggttcaaatgattcttgtgcctcagtctcatgtgtagctgggattacaggtgtgcaccaccacacctagctactttttgtatttttcatagagaaagggtttcactgggcacggtagctcacgcctataatcccagcattttgggaggcagaggcgggtggatcatgaggtcgggagttcaagaccagcctggccaagatggtgaaacctcgtctctactaaaaatacaaaaattagccgggcgcagtggcaggcgcctgtaatcccaactacttgggaggctgaggcaggagaatcacttgaactcagggggttggaggttgcagtgaaccgagatcacgccaccacactccaccctgggaagcaaagtaagactccgtctcaaaaaaaaaaaaaaaaaagagagaaagggtttcaccatgttggccagcctggtctcgaactcctgacctcaagtgatctgcctacctcggccaccgaaagtgctgggattacaggcatgagccactgtgcccagcctccaatcctactttttattggaacaaatatttcttcagcatctactatttgtcagacactgttctttgtaccaaggatatagtagtaaatacaagagagaaaaatcatgaatttattggggtcgagtgggataattataatgaatatataaacataattataatgcagtgtagtgaatgcaataagcccaaggtactatgagagaagaatatctttttttttttgagacagagtctcactctgttgcccaggctggagtgcaatggtgtgatcttggctcactgcaacttccacctcctgggttcaagcgattcttctgtctcagcctcccaagtagctgggactacaggcgcctgccaccacgcctggctaatttttgtatttttagcagagacgggatttcaccatattggtcagactggtcttgaactctgacctcaggtgatccacccgctttggactcccaaagtgctgggattacaggtgtgaaccaccacgcccagctgagagaagaatatcttacttggcttatggtgaacttcaccaaacattttatttgaaatcgtttaagtagagttttgtatcttgcaaccaaaagaatctgcttgggccaggtgcggtggttcacacctgtaatcccagcactttgggatgccaaggcaggcggatcacttgaagtcaggagtttgagaccagcctggccaacatagtgaaaccccgtctctatcaaaaatacaaaaattagccggacgtggcagcgcatgccttgagtctcagctgctcaggaggctgaggcaggagaattgcttgatcctgggaggcagaggttgcagtgagctgagattgcgccactgcactccagcctgggtgacagagtgagactccgtctcaaaaaaaaaaaaaaaaaaaaaaaacccagaaaaaacaacaacaaaaaaaacccagtcctgtgcagtggctcacgcctgttatcccagcactttgggaggccgaggtgggaggatcacctgaggtcgggagttcgcaaccagcctgactaacatggagaaaccccacctctactaaaaatacaaaattagctgtgtgtggtggcacatgcctgtaatcccagctactcgggaggctgaggcaggagaatcgcttgaacctgggaggcggaggttgcagtgagccaagatcgccccactgcattccagcctgggtgacagagtgagactctgtctcagcctcccaaagtgttgggttacaggcatgagccaccttaacatatatgtgtgtgtgtgtgtgtgtgtgtgtgtgtgtgtgtgtgtgtgtgtgtgtattctacaaaattagtgtggcgctcctccctccccaggtgtggctaaaaatgcagacagcttacctaggttaaatttagtctccatcactcattaacatgtgacctagaacatattacataatctgtgtttgcttctgttttttattttacctcatgggatttctgtgaagactcaatgggaaattcatatgtagagctttagaagtatacctgacatttaataagtactcatcaattgttagttgccattttgattatcgctgtggctgttatgttaatcttgtgtgtgttgcaatttgaagaagtgtcagctgggaaagtctgggtagcggtacttgcgtgtgatttccatatttaaagtctggtcctcagctttgctaaactaaattttgttagtatacacagagaccagctcacatgagtcatactagcacatatatatcaatgtgccagttattttgtcacaacaaattttattgtcacacaggacattctggtgaaggtattggctccactgacttgacgcagctatcagagacccaagcagaccactctcttcccattaacatattctctttacaagcactgtaaaatattattatttttaaatttttttgagacagagtctctctctgtcgcccaggcaggagttcagtggcgcaatctcagctcactgcaacctccgccccccaggttcaagcgatcctcctgccacagcctcttgagtagttgggattataggcacccaccacacagctaatttttgtatttttagtagagacaaggtttcaccacgttgaccaggctggtctcaaacttctgacctcaagcgatccacctgcctcggcctcccaaagtgctgggattacaggcgtgagccaccacgcatggccaaaaaatagtagtaacctctctctaggcctgctccctgagggtgcttacaggtcaccttgattggattttgggtgtgcccaacccttcagttttattttaacagcagatttctcagctctgtcattcctgctgatggataatctcatccatcaccttttgagtgttttctaattttatttctcagagagaaacctcaacttcagctttaggggtgcagtcattgctaatatgaaagatcatgtcaaccatttacaaataactttattcaatttaaaattactgtgtactttcagccatgataaaatgaagtagtattccttcagttgagtctaaaattgtcttctccccatcttcttggaatccttgctatttagataactccagaggggcaaatgcttaaagtattgactcatctacgtgagagagagtgcttggcacttaagtatgctttaatagctatcactctacggaacagatgtttgtatgtttcgtgggcatcataaatattaagaacgatgctataaggtttagaaagcattttccattaattgttaatgctcactgcatggataagagagggaaattccttgggggaaaatcaagagacatttttatttctaacattactgtatttcgatttcagggctgaaactggagagaattagtctctgatttctggaatattatatgaaaattctaattactgtaatgcttgagtgtcccttgttccttatagctccgtattgagatatgtaatgtgtagtgataataggaaacatggtggaaggagaaagcaggggtggattcaaaggccagttccacctcttcctggctcaaggatcatggatttacttagcctcttcgaatttagttatttaacctgtaaaacagaagctaataaaaatgacctcatggagttatgacaattttttaaaaatgtgtaaaaatgctaggtcaattcctggattgcagttaattcttctttgcatcaaattagagatagtaagtgcttggtgtgggctatgctcaaaaaaagccaatgtgtgcctaaattctttaaatttttggcaagtaaagattgcttagtgtttcttaccatcacatagaaagctttgcccagtaggctgggtgcggtgactcatgcctgtaattctagcactttgggaggccaaggtgggctgatcacctggggttgggagttcaagaccagcctgaccaacatggagaaaccccgactctactaaaaatacaaaaattagctgggcatagtggcacatgcctgtaaacccagctacttgggaggctgaggcaggagaatcacctgaacccgggaggcggaggttgcggtgagccgagatcgagccattgaactcaagcctgggcaacaagagcgaaactcagtctcaaaaaaaaaaaaaaaaaaaaaagaaagcaagctttgcccagtgagacttcaggtcccatatgcaggtctagtgcctgtcgatctttcctatctgcccatggcatttattcactcatttattgagggcccactaggcactataaaggcaatatggtgtctgacctaaacaagctcatagtcttgtaaaggacattgatgcaaaaacaattacaatgtcatggtaagtattacctctaatcaagacaagttaaagggtgggggaaggtcagagggagtacacagttctgtttaggtaggggaaagaagcatattaaggaataagaaatccaggtacccagggcaccaggacatactggatgccacgaaaatgagaaatgtgctggttaactcaggtttctgtacaaaactctttaccttgctagtaaaagataatttgcttctgcttgcaccaaagaagacaatgctttcagatggaaattaacaaaacaaaacagaagacaaaaacctcctctctagagctgacctatgtctgttgattagttttatcatgagcagctgcagatgaagtcaactgaaattctgaaatcaaatcatgcatagcaccaagctgtttttttctggaatgaattttaaactgttgaacaaagtctaaattttaaatcctttggtacatctcccaaatggtctgattcagtaaattgcaaaaaaaaaaaaaaaaaaaaaaaaaaaagagagagagagaaagatagaaagaaatgagaataagaattatagaaaaatgaagctgggcacagtggcttacgcctgtaatcccagcactttgggaggctgaggtgggtggattacttgaggccagcattcaagaccagcctggtcaacacggtgaagccccgtctctactaaaaatacaaaaattagccaggcgtggtggaggcgcacatccgtagtcccagctactagggaggctgaggcagagaatcgttcgaactggggaggcagaggttgcagtgagccgagatggcacccctgcactccagcctcggtgacagagcaagacgtcgtctcaaaaaaacaaacaaacaaacaaacaaacaaaacacacacaaagaaaaggaaaagaaaaaagagaaaaaaaaaaagacccttggcacggtgaatctgggtgaatagagagcatttatttttcttagtcttctcaaacttctttgaaggtctgtctacacttgctgtctcactttctacccattcctcaattcaccacaacatggctgctgcctgcgccacaccaggtaaaggctccttccacttcaccaacaactttctttttctttttttttttggcaaaagagctttatttacacactggcacaaggctcgtggggtgtcagctgaagaagtaggtggaacgcttcacctgctccaggtcgaaggcccctggcttgggcaccgcctgcagtgtctccttcagctggctggcctaaaagatcttctggggctcagagcagaaccgcttgaccaggaacctggacaggtcctgcaggatgggctcgctgtgcaagcggacaaactgctcccggcacacctggttcatgacaagagacatcagctgcgtgcgtccagtaacagtcgtgcacagagacgaaggtcaggcccttcctgtagcagtgcagggcggtgagcatcatgtgtgaggagtccagcgagtggatgaagttgggcgggaagccgttcttctgctttcgtgtgttgggctttcggctgatgtctccgttgtgggtgtaggtgatgctctgaattccacctcctatttgcttgaccttggagtccaggcgatacggctggatgacggggacgcccaggggtgtgacccactccaccacggagcccgtgtgggagatgaggcgggcgctctcggtcagccagtgctggatggcccgggtccccgagaacatctcctgtagactcttgaagacctggcgtacgagatagtgggaggcctcccacacgaactcctggggaaagtcgttcagctcccggaggcgcttctcaatctgcaggcgcccgccatagcgggtgaccccgtacaccatggtcatcaccgtctgcttcaccacctcgcgggtgatgaaaccttccagcacctgtgccacccgcgtgccccgctgggcgtcttgcctacggaacacctccacctgcccagccacgccgctgtacacgtcctgcggcacatccgagggctccaggttgacggaggcggcgcccacgctgtcgcggcccagagcagcataatgctgcaggccgttgcaagagccgtcctgatggacggggaggtgggagacataggcggcagggtcggaggcgcgcacagtgttcgccacctccatacagcaggccagcgtctgccagggttcctccgcgcccatccaccactttcggcccgtcaagggttggtccgcggagtccaagatgtcatccatcacctcctccgcaaaggccaggcgcttccgcagaggctcccgcttcttcaaccccgtgaggttgaccaggtggatcttgagccaatccaggccgcgcgggccgagcgggcggccctgggcgaactccagcagggcccgcgccacgtcgctgcccaggtggttgaagtgcggcgggcaggggtaggtgcggctgcggaagtccatgttgtgcggccgccagaagacgcggtcccgcaggtgctgcgccagcgagaggcggtacagcgcttccgcccgcaggctgtgcatctcccgggccaccttctggcagtgcgccagctcccggtgcagctcggccttgcgggcgggcgcggcgctgtgcggcaggtgggcttcgggcggctggggcgcctcggagggcggggccggcacgcctaggtaggggcagcccttggcctggaagagctgcagcaccaggtccagcacgcgcccgttgacgcgccaggcgcagttgcccagttgggcgagggcgtccagcgcgccatgcagcgcggtgggcgggcaggtttccagcagctcctggtgctgcgtggcgccttccaccgtgcgcatcagcttggtggggctgagcaggaaggcaccagagtgcggcgatgtccagggcagcggggggcaaaacatgggtacatccaccgcctcgaaggtcagcgtgggctccgtagccttctccagcagctgcacgtaggccgggtgcggcttcaggatgccgatctgctggacgttgcggaaggaatacacgtggtagaccacagggacaagccgagaggagcgatgcggcttgtccaggctgcatggcatctgcgtagcctgcaccagcatctccgccagcagcttgcccagctccatctgcactggcaggggccagggctgctcccgcagggcctcgggcgcccccagcgcctcacagtactgccgcggcaagcaaggctcgggcacctcggcgtcggaggccagcaggcataggtacttcctgtagtggttctgcagcgcctgcacctgggcactgacccgctgcctctgcaccacgtgccggctgaaagtgcgcgcactcagctcccgggccagggtggtgaaggactcaccttgggcgggcagcgcctgcaggacctgcaggagcatccgcaccacctcgcactcgtccagcaggcacaggaaggggtacagtgagaaccggccctcgtacacctggcgctctaggcggttcttggtctcccgtagctcccggcacagtgctttctcccattggtcccgcagggtcttcagggtcttccgcgcgtgcgtgacctccttgcttggcaacgtgggcttctccacggacaccacgcacatcctgctggccagctccacgtggagctgcttctcaaagaggcactgcagggtcttcaggggcaggtgcagcttcgggtaggacacacgcccatccttggcatacacgtccctgagcagcttggaggtgttgaccgggggcggcagctgcagcgggaggctgaaggtgggcttcaccttgtgcacggccttcagaacagtggcccgatcctcctcagacaggggcacggcggtgaagagtgcctgcagcttcagcccctcctggctcatctgttccagacacctttcgatggtcccggcgtcctggtcctgcctccccatgcactggagggcagccgcataggacagcaggtccggggtcaagccggcatccttcaccatgaataacacatacaccagctccttgaaggcaccctgccgcgcccagccaagcatcacggcgttgtacatgtccagcgtgagcagcttccgcttctgccgctggccgtggtggaccaccagcaggtggtgggcgaggggcagttggtcagtgagcaggcagcacttgaagaaggccaggagcctctgctgctgacctgagagctgggcctgcgagtgctgcgccgacggggcctgctccacatcgaggctcagcttcccaggggcctcctgcagcagccgggccagctgctcctcccaggggctctcggggggcctggcgcgtgcagtgctccaggcacccggccatctgcttgctcaggagccggggctccacctgcaggcgcctggtcagcgccttgaactccccgctctggaatggcatctgcagcttcgccttcaaccgctgcatacgcatctgctgggtccgcttatccttctccagtctctttgcccagcggccacagggcaccggggtggcatccttgacccccatctggaccttcctgggtggctggaggctaccacctccactgccacattctgggagccacgccacatccaccctgttcaccaccacctccgacacgctcccagcctgcagctgccgcacccgcgcctggagcacctccagcagctccacgtggccccagtccttcctgcggtcttggtcttgctcctgggggctggcggatgagctcctcctggggccgcagacgccaccgacggtcccttctttggcggggagtcccgggcggccgcaaggccgcagggcccgtttgagccccgccgctccacaactttcttgttggtaaatacagggggcatttcttcagatcttaattgatttttctatactctgattgcttcctctttctgagatgcttgcttctcttggctgcgtggaaccatagtctcctctttctgcttgctccttcttagtttcctcttgggctttttttcctttgcctgacccttatatgttcgagctcttagagatggtcctaagtctctactcttctcaccttcaccctcaaccatggacattgaaagattctccccggggcctgaaaacttaagggaatgaataactcctccttactcaggcccagtgccaaggctcaaggccacttgtaccagcagcgtgcgtcagcaagatagcagaagcaggaagacagctggctggaggacacatacgccggaagattgagagggaggccgtacgggtactacatagcagacacgtcagactgggacactgcctgtttacagaggactataaaacccctgccccggactcacttggagctgacgccattttaggcctcagtccaccagcacccaggcgcttattgagacagcgtgttgttccacaccgcctcacgttgtctgttggcgcgctctgctctcgcggttcgaacgatacaagagccttgcagacatctcattttatggctttctttactctttagaaacaaatgactcaaaaatctatcatctctggccagtcgcggtggctcacgcctgtaatcccagcactttgggaggctgaggcgggtggatcacaaggtcaggagatcgagaccatcctggctaacacagtgaaaccccatctctattaaaaaatacaaaaaactagccgggcgtggtggcacacacctgtaatcccagctacttgggaggctgaggcaggagagtcgcttgaaccggggaggcggaggttgcagtgagccgagattgcgccactgcagtccgcagtccggcctgggcgacagagcgagactccgtctcaaaaaaaaaaaaaaaaaaaaaaaaaaaaaaaaatctatcatatctaccctgattcctttggtgagacccaaatgcgacattcatctgccttctagatatcacctagatgacttataggcaccccaagctccaaaatggaacacatcctttcacctcaacatctgtttctcctctagtgttacgtagcttattaaataactttaccatgaacttggttgaccacaccagaaacccgggaggtctccttcaaattgtttattctctctcctccacccccaacctgtccattataatcaaatatgaaattttgtcaccttgaaaccctaaatatttctttttttaacttttaaaaaagcttggtaaaatacacacaacataattttttttttcaagatagggtcttactctgtcactcaggctggagtgcagtggtgccatcatggctcgctgtagccttgacctcccaagctcaaacaatcctcccgcctcagcctcctgagtagctgggactacaggtgcctgcccccatgcccagctaatttctgtatgttttttagagaagggaggaggggtatcaccatctttcccacgcttgtcttaaactcttgacctcaagcgatcctcccacctcagcctcccaaagtgttgggattataggtgtgagccaccatgcctggcccaggtttaccattttaacctttttgcttgtttgttttttgagacggagtctcactctgtctgtcgcccaggctggagtgcaatgttgcgatcttggcttactgcaacctctgcctcccaggttcaagcgattctcctgcctcagcctcccgagcagctgggattacaggcatgtgccaccacgcctggataatttttatatttttagtagagatggggtgtcactatgttggccaggctggtctcaaactcctgagctcaagtgatacagccacgttggcctcccaaagtgctaggattatacgcatgagccaccatgcctggccccatttaaaccattttttaaccgtactattctgtggcattaagcacatttgtgttgccgaatggtgcaaccatcaccaatatccatgtgtagaactttttcatcttctctggttgaaattctatacccattaaacattaaatcttcactccctagtcttcacccagaccctggcagcaaccattctactttctgtctctatgaatctggtaccgcatataaatgaaatcacacagcagttgtctttgtgttggcttccttcacttagcataatatcctcaatgttcatccatgttgtaccacatgtcacaattttcttccttttttaagactgagtagtactacattgtatggataaactgtatcttgtttactcattcatcgcttgatggactcttgggttgcttccaccttttggctatcgtgaataatgcttctgtgaacgcaagtgtacaaacatctgtttgagtctttgttttcacttcttttgggtatataccctatatccacgagtgaaattattggatcatgtggaaattgttttattttttgaggagccaccttatgattttattttcttttttttttttgagacagagttttgctattgtcgcccaggttggagtgcaatggcatgatgttggctcactacaccctccccctcccaggttcaagtgatgttcctgcctcagcctcccgagtagctgagattacaggcatgcaccaccacacctagctaatttttgtatttttagtagagatggggtttctccatgttggtcaggctggtctcgagctcccgacctcaggtgatctgcctgcctcggcctcccaaagtgctgggattacaggtgtgagccaccttgcctggcccatatgattttctataatggctgcacccttttacattcctaccagcaatgcacaaagcttccaatttctctacatcctcaccaatgcttgtttttgtttgtttgttttctgagacagtcttgctctgtgacccaggctggagggcagtgacattgaaagaggagaaaggaagaaaccggtcaggcacacagttagggtggatccttggttgaattctttcaaacaaaagaacagcttgcaggcacagataagggaacttgcacaggggggcttgcctaagacatgcccacagctgcacagataagaaaggctatgcagggcggggcacggtggctcacgcctgtaatcccagcactttgggaggccgaggcgggcggatcacgaggtcaggagttcaagactagcctggccaccatagtgaaaccccatctctactaaacatacaaacattagctggtcatggtggcacgtgcctgtaatcccagctactcaggaggctgaggcaggggaattgcttgaaccaggacctgggaggtggaggttgtagtgagccaagatggcggtgccactgcactccagcctgggcgacagagcgagattccgtctcaaacaaacaaacaaaaaagctatacaggtgacttgcccagacatgcccacaatggaaaattccatcccctgacacatgcgcagtaaagggaacaaaggaatatagagtaattcaagctaaggacccgcatgctaactaggaggacagcgtggagctaccacaaattcatgccttatgcaaatgcaatagccagccctcatcagtttcttataaaagcctttgaattcaactgtaaaaatgacaaccctcttccaagtcccctctttgcagcagagagctttcttcttttgcttattaaatttttgctccaacttcacccttcatgtccatactcaactttcttggttgtgagacaaagaactttgggtgataccttggactacaagagactgctacattgtggcacatcggtgacactaacagcatgaccatggctcactgcagcctcaacctcccatgctcaagtgatcctcccacctcagccttcccagtagctgggactacaggcacacaccaccacgcccggctaattattttattttttgtagagacagtgttttgctgtgttgcccagatatatcttgaactcctgggatcaaggaatcctcccccttcaccctcccatagtgctgggattacaggtgtgagccactgagccctgcttgttgttttgttttgcttgagatggagcctcgctctgtggcccaggctggagtgcagtggtgtgatagctcactgcaacctccaccttccaggttcaagcgattctcctgcctcagctctgagtagctgagattacaggtgcccactgccatgcccggctaatttttttttgtatttttagtagagacagggtttcactatagtggtcaggctggtctcttggccagactagtctggaactcctgacctcaagtgatccacctgcctcagcctcccaaagtgctggaattataggcgtgagccaccgcacctggctcctgcttgtttttataagtgtcatcctaatgtgtgtgaaggagtatcgcactgtgcttttgatttgtatttccctaatgattagtcgtgttgagcatttttcatgtgcttattggccatttgtaaatctttagagaaatgtctattcacttcctttgcccatttttggatcaggttgtttagttttgctgtttttaagttgtaggagtttttttttgttttgtttttgtttttgttttttttgagacagagtcttattctgtcacccaggctagagtgcagtggcccaatcttggctcactgcaacctccacctcccaggttcaagtgattctcctacctcagcctcccaagtagctgggattacaggcttccgccagctcacccagctaatttttgtatttttagtagagatggggtttcaccatcttggccaggctggtcacgaactcctgacctcatgatcctcctgccttggcctcccaaagtgctgggattacaggcgtgagccacagtgccaggccaggagttctttataaattctgaacatcaatctcttatcagatatatgatttgcaaatcattcctctaaggctgccttttcagtttgttgatagtgtccgttgatacacaaaagtttttaattttgatgaagtccaatttatctattttctttttttgcttgtgctttcggtgtcatatctaagaaattatgaaatccgatgtcatgaagctttcctcctatgtgttctggtaagagttttatagttttagctcttacatttaggtctttgattccttttttgttaaaaatctaattcagataatgatgctcctctactcaggagcctctgatcatttcttatctcaagcaaagtaaaagccaaagtccttaggcaaggacaaagccctgtgctctcccctcacctctctctaactttatctccttctactttctccccagtgcccaagctgctcacagcctcaggggcctccttgcagtccctctggcaggcaccagctccccagggctccttcccttacccctattaagtcattggtcaaatatcttcttaaagaggccttctctgatcatcctatttaaaagttaattccacccaaatgcctacactgtatccttctttccagcctttttccacccatagaacctatcctttgctaacatactatatattttatacttatttattatttatttatagtctattcccctccagcccaactagaaaaaaaatagggatttaaaaaacagggatatcattaaaaatgaaaatagggatttaaaaattaaaaaatagagatttcagtagccgggcgcggtggctcacgcctgtaatcccaacactttgggaggctgaagctggtggatcacctgaggtcaggagtttgaaaccagcctggccaacatggtgaaaccccgtctctactaaaaatacaaaaaattacctgggcatggtggtgcatgcctgtaatcccagctacttgggaggctgaggcaggagaattgctttaacctgggaggcggaagttgcagtgagctgagatcgtgtcattgcactccaccctaggcaacaagagtgaaactccgtctcaaaaaaaaaaagagagatttctggccaggtctggctcacatctgtaatcccagcactttgggaggccaaggtgggaggatcacttgagcccaggagtttgagaccagcctaggcaacattgtgaaaccctgtctctacaaaacaatacaaaaattagctgggtgtggtggctcgtgcctatagtcccagctgttcaggagggtgacatgggaagatctcttgaacctaggaggttgaggctgtagtgagctgaaactgcaccactgcactccagcctgggcaacagagtgagatgctgtctcaaaaaaaaaaaaattgggatttccatttgttttgttcagttgtatacctggaacctagagtgatttaacaaatgaataaaataaatggattgtactgcatatttacctgtttccttcaggagactctaagttccttgcaggtaagatttatgcccaaggttatattcacttttgtatttacaaatttacaatgggcaacaaaccagtctctgatacttataagtgtcttggtagtcaattatttgtgagatactgaacaaattacaatacagtctgacagtctataaaaagacactgtcaggcctgagcccaagctaagccatcatatcccctgtgacctgcatgtatacatccagatagcctgaagcaaccgaagatccacaaaagcagtgaaaatagcctgttcctgccttaactgatgacattccaccattgtgatttgttcctgccccaccctaactgatcaattgactttgtaacaatacaccctaccccccttgccataatgtactttgtgatattctctgcccccccattccccccccgcaccccccccacccccgcgaatgtactttgtacaatacaccctccccacccttgaggaggtactttgtaatatcctgccctgcctttaagaaggtactttgtaatattcttcccccaacccccccccctccggccgccccatccccccttaagaagatactttgtaatattccccccacccttgagaatgtactttgtgagatccacccctgcccgcaaaacattgctcctaactccacggcttatcccaaacctataagaactaatgataatcccaccaccctttgctgactctcttttcggacacagccccctgcaccctggtgactaaaaagctttattgctcacacaaagcctgtttggtggtctcttcacacagacgcacgtgacagacactttcatatatttccatgctttgagaataggaagtaaaacaactggacttttgaagcagggcaagtgtgtagcaaggcaaggatggagaccaccaagtccacagacagaaccagagctagcttcttgtgtcttgggaataattcacacatgtatttatttatttatttatttgagacagagtttgacactgtcacccaggcctgagtgcaatggcatgaccaccgttcactgcaacctctgcctcccgggttcaagagattctcctctctcagcctcccaagtatctgggattacaggcacacaccaccatgcccagctaatttttgtatttttagtagagatggagtttcaccattttggtcaggctggtctcgaactcctgacctcaggtgatccacccacctcagtctcctaaattgctgggattacaggcgtgaaccactgcgcccagcccatgtctgtattttacaagttgatttttattatgcaaaaagcttcatgttcagataactatgaatcaagttaccgttgtggacttgggcttcctgagagcagattccctctctgacttttcctggaagttacacaggcacttcttcataccatgctggggaagcatatcatttagtttgttagcatttctttttttttttttgagacggagtcctactctgtcccccaggctggaagtttgttagcatctcttagaaatcttcccaaattggcaaacccaccaagataactgccaagatatttcttgacacattattttgacttcaggttattagttaggattcctgttaggtatcagatgtttattaggctcaggcacatggggctttgaaatatctgaatccagcacatccagggaagagaagaagagaatatagccactggcacaggaattcagtttgtctcccttttgggcaccaggaagtggaatccaggatcctcttcccttgagcttccaagtaaaagcttccctttaaatccagaagtggggaaagagcctccaggtatcagtggctccaagccctttgctccgtggaaagtagataaggacaggtgagcaggactaatggtctgagtggggtccccccagttgcaggctctgtctcttccaagctcagtcaaaggtcagtagcaaaaagaaagcctggaatttgactgttgcgatgctgtgctctcctgcaaacccggggtctgcactggaggtttcatcccattgctctgtgtcattagacaccctcacccccatcacaccctagctaggtggagatggaactcttttccgttacaggtcttgaaacccccaagtagagcaatttctatctccctgagtcctacgccttttcaacctcaaaatcctccaggaacacctgtcatctctgcactttagaagtcacaaaaataggggttactgcagcctgctaggggaaagggacaatgaaaggggtgctttagaatcgcagaatgttagttcttctcagaggatcttgtccagctccctccctgcatagatgctaaggcccagagaggtgaagtgtcttggcctcttagtgaagaaactaaggccagttcccaggactcctcgtctgaatgcccttttcactctttcattctgacttccatccaaatatgcttgtggaaatgagaatattataaggaggaggacttatgaggaaggctggaatgatgaaaagagcccagcagttcaagtgaagagaattgaatttgagtcttaatcataattacaattactgagtatgtaattgttactgaaccctagtctcagtgtcttaatctatagattaatctatagtttctaatctactatcttttttttttttttttttttttaggcagggtctcactccagtcggccaggctggagtgcggtggtgcaatctcacggttcaagcaattctcctgcctcagcctcccaagtaactgggactataggcatgcaccaccatgcctggctaatttttgtattttttggtagagaagggtttttgccgtgttggccaggctggtctcaaaactcctgaccttaggtgatccacccgccttggcctcccaaagtgctgggatttacaggtatgagccaccgtgcccagcctactttctaaactaatctataatctagttttcttataaggctattgtgaaggtgaaagcactgggtaaatcataaagcattatacaaacaaggagatctacaagagaggtctgaggttgggaaacagtaggaagggatggtttacacagttgagctttagggccctgaaactgtaggcaaagtgttttgtgttcgtgcatttttctgggaagaagatctataagttgcattacattgttatttcccagaaaaggttaagaagagccactgatgttagtacttgacaccactatgatcgatctgagaactgttctagttctacagagagaaaaatgaaggaggaatcatttttgagaaattcatagagttgccagataaaatataggttgccacttaaatctgaatttcaaacaacaaaccatgttttagtataagtatgtcccatgtgatatttatatgaagttcacatgtaactgggcatcctgtatttttattcgccaaatctggcaaccctagaaattcactcatcaatggagaaaaggtgacttgtgttttgatgagcttgccttccagatcttgttataacttgttcctgctggcagagagcaggattgggatgatgatgtgttttagaagcaaaaatgagagtcggacagcagcctcattgaatattagacaccttagggattgttttgaattgaagcatgtcaccttattgataccatagcaggggcagattcaagctttgcatggcttgaaatctatatggtactggggaccttccttgggaaaaataaggcaaaattgcaagaacaaaattagatataaatatgtatgtttgtttattcaaatgagaaaagaaggcccaataaaccactgcagccttgatacttagaatagcacctggtgggccaggagcagtggctcacgcctgtaatcccagcactttgcgaggccaaggcaggtggatcacctgaggtcaggagtttgagaccagcctggccaacatggtgaaactctgtctctactaaaaatacaaaaaaattagccaggcatggtggcgggcacctgtaatcccagctacttgggaggctgaggcaggagaatcacttgaatccaggaggcagaggttgtggtgagctgagatcgtgccactgcactccagcctgggagacagagcaagactctgtctctaaataaataaataaataaataaaaaaaagactagcacctggtacatagtaagtactcaacagattaaaaaaatggtagaaatcagtgttttccgtgcatgacacaaagcataaatagtatcaggaagtctaaaattgcactgttactttgggcttatgtaattgatgaaggattaatgtcttgtacatgaggatacttaataaatatttgttaatgaacatttagtttctcatggggacgtttgccaggaatcaagggcagaaaaaaaatgtcatattttctgaagtgagcaaagatatttgggaaaatatgaaatatctatataatgttttgaaaacaatacggaaagttgtaccttttctcagtttaacttttgtttcctttttgagcattctggctaacaactgcatgacaggattttaagttttgaaatattggttttcatatttaatataaccattttccctttttcctttttctctcttttcttttctttcttttttctttttcttttttttttttgagacaggatcttgctctgtcactcaggctggagtgcagtggtgtgattatggcttactgcagcctctacagcaatcctcccatctcagcctccagagtagctgggaccacaggcgcatgccaccatgtctggctaattttttttttaattttttatagagacagggtctccctatgttgtacaggctggtctcaaactcctggctcaggtgatccatctgcctcagcctcctaaagtgctgggattactggcgtgagccattgcacctgctcctttttccctttttcttaaaatgaagggctacttgttcttttaaagaaaccatccacaggtccacaggccgggcaaggtggctcatgcctgtaatcccagcactttgggaggctgaggtgggcggatcacctgaggtcaagggttcgagaccagcctggccaacatggtaaaacccttcctctgctaaaaatacaaaaaaaaaaaaattagctgggcatggtagcacatgcctgtagtcccagctgttcagggaggctaaggcaggagaatcgcttgaacccaggaggcaaaggttgcggtgagccaagatcgcaccactgcactccagcctgggcaacacagggagactccatgtctccatctcacaaaaaaaaaaaaaagaaagaaagaaaagaaaagaaaccatccacaaaggtaatatgctcattatggattctatcatttactggtaaatataatgtagtaatttctcagttggtcttttgtaatagatacatcactataataaatatcagaatcagaaaaacctatgtagcttattttttccccctatatgttacataggttttttaaagtgaagaggtttttcttttttgtttccagattaaactgtgctttaaaaagataaatacagacaagtatggaataaaagccaagcttttcttttttctcgagacggaattttgttcttgttgcccaggctggagtgcaatggcgtgatctcagctcactacaacctctgcctcctgagttcaagcggttctcctgcctcagcctccagaggaactgggattacaggcacccaccaccatgtccagctaattttttatatttttagtagagacgaggtttcaccacgtaggccaggctggtcttgaactcctgacctcagatgatctgcccgcctctgcttcccaaagtgctgggattacaggcatgagccaccatgcccggcccaaagccaagcttttgatttattctatattatacgtcagaagcaatactaacagagaaattcttgacacagtttcttctcaaagcatttgaaagttcatataaatttatgcatggaaaatatatgaaaggacactcatcaaaatgctagtggtaattacctcccagtgatagtgaaattataggcaattttatattccttttccctgtccatattttctgatttttctcaaataaacatattaaaatgtagagataactcttgggaaacagaaagctattgcataagaaatgatctttgagatattaaacttgacatttgagaatcggagttttcacttagcatattttatcaccagtaatggattgaaattacagctcaccttgccatctgttaaatgggaatgaagaaaacatcaaagaagcagagtatatttaaagcacctagtatggtgtgtattatgtgcttaataaacttaagctttagcttttgttattattaatatatgctaagaatctaaaaataaacttccttgataccctttaaacattacgtattctcaaatcaacaggaggtaaatacttcgatcatttagaaaagccatcagagaattaagctaatttttagttttccaattttcaattaataaaatatttctaatatacaggaaataacaagagaaactcaccctctttctcactcttcttaattttcaatttttttttttcttcccgagatggagtcttgctctgttgcccaggctggagtgcagtggcgtgatctgggctcagtgcaacctctgcctcccaggttcaagcaattctgcctcattctctcgagtagctgggattacaggcacatgccaccatgcctggctaatttttgtatttttagtagacatggggtttcaccatgttggccaagctgttctccaactcctgacctcaggtgatccacctgccttggcatctcaaagtgctgggattacaggcgtaagccactgtgcctggcctcactcttcttaaacgtgaaatcttgccaggcgtggtggctcatgcctgtaatcccaacactttgggaggctgaggtgggtggatcacaaggtcaggagattgagactatcctggccaacagggtgaaaccctgtctctactaaaatacaaaaattagccaggcatggcggcatgcacctgtaatcccagctactggagaggctgaggcaggagaatcgcttgaacccaggaggtggaggttgcagtgagccgagatggaaccactgcactccagcctgggcgagagagcgagatgctgtttcaaaaaaaaaaaaaaaagtgaaatcttacaggtacaactaaagccctaacctctgctcttcccttacctttctccccagagataactatcctaaagctcacttgtagcacttccatacccgcttttgtactattcctacttatatttgtactttaaatctccatgcttacatctatactttacattcagaaataacatatacggctatttttgtgtggggaaacacaaagcctaatcagaaattccttttacttggaatgcttttcttccccattttcccatcttaaacaataatactacatttgttttgtttttgttgttgtttttagatggaatctcgctctgtcgcccaggctggagtcctgtggtgcaatctcggctctctacaacctccgcctccgggttcaagtgattctcctgcctcagactcccaagtagttggaattacaggtgcatgccaccatgcccgggtaatttttgtatttttagagatacggtttctccacgttggccaggctggtctcaaactcccgacctcaggtgatctgcccacctcggcctcccaaagtgctgactttacaggtgtgtgccaccacaccagcctacatttgtttttaataaaactttgctttatcaaaatgaaatgactccagttataaactttgcattccacattaacacatggttagttgttttgttttgttttttagacaagtctcactctgttgcccaggcttggatgcagtggggtgatcccgcctcggcctttcaaagtgctaggattacaggcatgagccactgcacctggccaacacatggttagctttaaaccaataattactgtaagataagacaaatctccctgaaggttccatgtagaatagtttgtaatccatattctaattatgacttataaaacatagaacttagaaaagtaattactcctaaataagtttgttcatttattaaattgagttttactctaaaatatgttcttaggtaaacagaacagatctaattaatcaatttaacaaggtgctgcacttatagcaataaaatctttttctaatccttattcaaattcaaagtaccaagccattgttgggaaatagttattaattctccaaattattatgacaatcctatcccttcaaatattgtttattaacctaaaaatataatttatggagagctgctactacaaactattaaatggaattagcacatatatagacagagaattactaacaagatgttgtcagtttgaatggtaaaccaatgtgtctcctagtagtcacctcttctcttcctaaataatcacaaagtgaccactttaaaagccattctaagctgggcatggtggctcatgcctgtaatcccagcactttgggaggccgaggtggctagatcatgaggtcaggagttcgagaccagcctggccaacatagtgaaactctgtctttactaaaaatacaaaaactagccaggcatggtggcatgtgcctgtcgtcccagctactcaggaggctgaggcaggagaatcatttgaacctgggagggggaggttttggtgagctgagattgcgccactgtactccagcctgggcaacagagcgagactccgtctcaaaaaataataataataataaaataaaataaaataaaaaaacacaacaaaaaaaagccattctaggattttgctgcagtgagtgccaagctctcttctagaggaattgagcaccttatccccctttttttttttttttttttttgatacagagtctcactctgttgcccaggctggagtacagtggcctgatctctgctcactgcaacctctgcctcctgggttcaagagagtctactgcctcagcttgccagtagctgggactgcaggtgtgtgccaccacgtccagctaatttttgtatttttagtagagacagggtttcaccatgttggccaggctggtcctgaactgcagacctcaattgactcacctgcctcagcctcccaaagtgctgggattacaggcgtgagccactgtgcccagccagccttattcattttgaaaaacacaaggcagtcgggtacagtggctcacgcctgtaatcccagcactttgggaggccaacgcaggcagatcacgaggtcaggattttgagaccagcctgcccaacatggtgaaatcccatctctactaaaaacacaaaaacttagctgggcatagtggagggtgtctgtaatcccagctactcgggaggctgaggcaggagaatcgctcgaacccagaaggcggaggttgcagtgagccaagattgcaccactgcactgcagcccgggcgacagagtgagactccatctcaaaaaaaaagaaagaaaaaaagaaaacaacaacaacaacaacaacaagtcttcagtcttccagcacttctgttgtccacactttggtgaaaaatgatagcaacaaatgagttatatcatccgtgagactttttattcttggctttaatccctctgggccaggagctttaaactcaatgggaatatccagtattctctaaacaacatctcctctgtcaagagctttgcttgtctcttaactattttgtcacattttctggtcagaaaagcagcaacataggattggagtaggtcccttcttcctttctctgtcactgccattgatagtatttcttatttttaaaatagagacagggtctcactttgttgcctggtcttgaactcctgggatcaagcaatctgccagcctcagccttgcaaagtgctaggattacaggcatgagccaccacacccaaaagaataaaataactggataacttccttccagttctttctgccactgagaagaaattaacattcaactttatttttctctccatacttttctccccagtcatttcccaatagggagaaaaagacataatttattagctgctgttaatacttacccaaactaatctccaatttaaaaataaacaaggccgggtgtggtggctcatgcctgtaattccaccactttgggaggccgaggtgggtgggtcacctgaggtcaggagtttgagaccagcctggccaacatggcaaaaccccgtctctactaaaaatacaaaaattagccaggcctggtggcacacgcttgtagttctagctactggggaggctgagacaggagaatcgctcgaacctgggaggcagaggttgcagtgagccgagatcgcaccactgcactccagcctgggtgacagagagagactccatctcaaaaaaataaaaataataaataaataaataaataagtctttttactaaatggtgctagaacaactgaatgtcaacatgcaaaataatgaaatcaaaccccttcctcacacaacacacaaaagttaactcaaatggattatgtaagacctaatataaatgtaaatgtaagacataaatgtaagagctaaaactataaaatgcttagaagaaaatataggaataaatcttcacagtagtgggttagtcaaaaccttcctaaatatgacactgaaagcataaatgacaagataaaaaatagctaagttggtcttcataaaaattaagtcttttgaacaggcccagtggctcacacctgtaatcccagcactttgggaggccgagggggctggatcacctgaggtcaggagttcgagaccagcctgaccaacatggagaaaccccatctctactaaaaatacaaaattagccgggcatggtggtgcatgcctataatcccagctactcaggaggctgaggcagtagaatcgcttgaacccaggaggtggaggttgcagtgagccaagactgtgccattgcactctagcttgggcaacaaaagcgaaactctgtttcaaaaaaaaaaaaattaagtattttgttgtgtttcaacagacaccatcaaaaaagataaaaggtaacccacagactaggaaaaagtatttgcaagtcatattgcatgcatgcacttcataatgatattttggtcaatgacagaccacttatacagcagtggccccataagattataatatcatatttttactgtatcttttctatgtctagatacatgaataacattgtgttacaaatgcctacagtatccagtacagtaacatgctatatacagggttgtagcctaggagcatgggctataccagatagtctaggtgtgtattaggctgtaccgctagatttgggtaaatacactctatgatatttgcacaatgacaaaattgcctaacaacaaatttctcagaccatatcccagtaattaagcaacacacagctgtatctcatgagagactgggatccagaatacattttaaaaactcttacaactcgccagacgcggtggctcacgcctgtaatcctagcactttgggaggccaaggtgggtggatcaaaaggtcaggagatcgagaccatcctggctaacacggtgaaaccccgcctctactaaaaaatacaaaacattagccgggtgtggtggcggatgcctgtaagtcccagctactcaggaggctgaggcaggagaatggcgtgaacccggaaggcagagcttgcagtgagctgagatcgcaccactgcactccagcctgggcgacagagcaagactccatctcaaataaaacaaaacaaaacaaacaaaaaaaaactcttacaactcaatgataagacaacccaattaaaaatggacaaaagatctgaatagacattctccaaagatgtcatccaaagccaaaaaacaatgaaaagatgctcaatctcaatagtcactggggaaacacaaatcaaaaccacaatgagatactacttcacatccactaggatgtagtaaaaaagacagataatgacaagtattgataaggatgtggagaaattgaaactctcatatgctacctgtgggaatgtaaaatggtgtatccactttgaaacagtctggcagctcctcaaaaagttacacaaagctaccatatgacccagcattccaccctagagaaatgagaacatttatccacacaacaattggtacatatatatatattttttttaaccggagtctcgctatgtctcccagggtggatgcagtggtgccaccttggctcactgcagcctctgcctcccggattccagcagttctcctgcctcagcctcccaggtacctgggagaacaggtacgtgccaccacgcccggctaacttttgtatttttagtaaagatgaggtttcaccatcttggccaggctggtcttgaactcctaaccttaaacttctgatctgcctgcctcggcctcccaaagtgctgggattacaagcatgagccaccatgcccatccaagaacattagatctaagccttcagtttacaatctaagaaagaaaatggccaggcgcggtggctcacacctgtaatcccagcactttgggaggccgaggcgggggaatcacctgaggtcaggagttcgagaccagcctgcccaacatggtgaaaccccgtctctacctaaaatacaaaaaatcagccaggcgtggtggcaggtgcctgtaatcctagctacccgggaggctgaggcaggagaatcgcttcaacccaagaggttgcagtaagctgagattgcaccactgcactccagcctgggcaacaggagcgaaactccaaaaaaaaaaaaagagagagagagaagaaagagaaggaaggaaagaaggaaggaaagaaggaaagaaagagagagaaaaagaaagaaagaaaggaaggagaaaaagaaaaagaaagaaagagacgatggtctgtccattacatcccattctgtctcttccctaagtaagaacttctcttttcctactaatgcagaagtttcatcatgagttttgtcttctctgaaaaatgcagaatgaatttctctgtttcatctcttactatctatctgtttatccatttgtctactcatccatctatccactaatccatccctccatctacatatttttaatcagaagaaaccttaggaaaaaagtctacttcaatcctttcattttatgacttatttagaatgccaagatcccataaggagatgtactcaaaccatgattttgttaagcacatattctctaagccaatacatttggcaggcagaatctaccaagcataatgtaaaaactagctgggaatggtggctcacgtctgtaatcccagcgctttgggaggctgaggtggaaggatcacttgagctcaggagtctgagaccagcctgggcaacataacaagaccctatctctacaaaaaatttaaaaattagcaaggtgtggtggtagcaaggcgcacctgtagtcccagctacttgggagggtgaagtaagaggatcacttgagcctaggaggtcaagactgcagtgagccatggttgtgccactgcattccagcctggatgacagaacaaaaccttgtctccaaaaaagaaaagcaaaacaaaaaggtaaaaacttgactcagggtgtaaacattgaagatgaatgagaaacaatagtattgtgttcaaaaagaagttaaagctgtaatgtttgaactcatctttttttttttttttttgaaaatggaaactgtgagctctgagggacagaggtcatgacttattcatgtttgccttacaccacatctgacacacagcagatgttccatgaacatttgaatgaaggaataattaaatcaataaaattacttttagtaggattatgttcttggccctgattcagatatgtccaatttttctagcctggtagactcttttttgaatgctgatgtcactacccaatatctctatttctttaattataatatatattttttcatattataatatttctgaaatcatgatgcatctcttatagttgattcattcagataatgtgttattttttctgaaaaacttatcaaatcaatggtgcatcttacaatcattgacatctcaaagctcaggaaattaacttgctaatactagcttgctgtcaaagttttgtatcatcagaaaatgtgagaggtatacatctaagtcattgaaattgttaaacaagtaaaagaaaaggcagagcaatttaacagggataaatattagatgctgaatttggatctaaaaatcaactacatatgttcgagaggagggatacatggctcaacagcagcagcagcccctgcgctgcccagtcccgattgccagatcctgcaggtcattatctcctcgtggtcatattccagggccaggaagtttcccattcagctagtattccaccccagactctctctctcttgctgccctggtcaattagtcctaacatgtggactctgacaggcacaaaggtgttagtaaatttgggagtctttttggacaggcttcaggggtataatcatataatcaacagcagtacaagggcaacagatttaggagtttcagtgaactgtaagcttgatatgatcaatgatgtgatataactagacataaagaaatctaagtaaatagtttccagcttaaagctgggtgtggtagtgtgtgtctacagtcccagatactcaggaggctgaggcaggaggaccacttgagcccaggagttcgaggttgcagtgagctgtgattgcgccactgcactccagtctgggaaacacagtgagaccttatctctaaaaagaagaaaaggaaaagaaaaagagaaagaaaaaatctcttccagctgaagttaaaactggtcttcctttctttctgccctccagtaaagtgccaggctacttctacccacacacttgaagagtaaagccgtgcccacattcaggcaatcagaataagaaacagactgaaactctaatcacataagaaatagtcaaaggacactttgggaggccaaggcaggaggattgcttgagcccagaagatcaagaccagcctgggcaatatggtgagactcatctctagaagaaaaaaaaaagaaaaaagaggcccggcacggtggctcacgcctgtaatcccagcactttgggaggccgagacgggcggatcacgaagtcaggagatcaagaccatcgtggctaagacggtgaaaccccgtctctactaaaaatacaaaaaaattagccaggcatagtggtgggcgcctgtagtcccagctactggggaggctgaggcaggagcatggcgtgaacccgggaggcggaggttgcagtgagccgagatggcgccacggtactccagcctgggcgactgagcgagactccatctcaaaaaaaaaaaaaaaaaaaaaaaaaaagagtcaaaggaatttgagttacttgtctcgccaatgactgaaaaggtgacatgtttccaattatatgaatgattgtcttgtggaagaacattttgggattaaattagaactgatatatagaagttgctgaagatattaactcaatataaattaaaccataatgcttttcaaaagtgggttgggctgcctctcaaacaagctacccatctctggaggtatttaggcaaaaattaggtgacatcttctagggaattgtggtagccggtctccaagatggccccatgatccatacctcctggtattcatgcctttgggtcattccgtcccttagttgtggactggacttaatgagtcacttctaattaatagaataagacagtatgctgggatataacttagagacaaggctattaaaggcaatatggcatcattccctttatcttgtatcacttgctctgggggaagccagctgtcatgcagtgagcagccctatggcaaggcccacgtgatgaagaactgcaatctcttgccaacaagcaagtgagtgagcttgaagtggatcttctagactcagtcaaaccttaagttgactgcatctgcagctgacagtttgacttcaacctcatcaaagaccctggattagaaccacccagctaaattgcaccaggattcctgaccttccaaaaccattttaaagttgatatatttgggggtaatttgtttttcagcaatagacaacaaatacagggatgtcatagatggttcagatatcttgttggaacatagtattttgtcttttatgatccctttaactttgagagtctatgatcaggtatgaaatgatatttttgtccagaagattattccccaatgggagttaatgctaagcaaatgaaaacaaatttccattgataggcattattttatttattttattttatgagacagagtctcgcactgttgcccaggctggagtgcagtggcacgatcctggctcactgcgacctctgcctcctggattcaagggattcgcctgcctcagcctccctagaagctgaaattataggcacccacccccacacccagctaatttctgtatttttagtagagatggggttttgccatgttggccatgctggtctcgaactcctgacctcaagtgatctacccatctcagcctcccaaaatgctgggattacaggtgtgagccaccgcacccagcctagaaacactacctcttatagccggaatcctattatccaactccactctaccatttctttactcttggttccacccttgccccttcacctaccacagcctgcttcttatctgtgtttacttaaacacaggctttgctccacccagcacctgtgcagcccattcctgatctgccagatcctgcggatcattatctactcctggccatgatccagagccaggaagcttcctattcagccaatattccagcccagcctcctctctctccttgctgctctggtcaatttagtcctagcatgtggactctgacaggcacaaaggtgttagtaaatttgggggtctctttggacagggttcagggctataatcatattttgaaagctttcaggtagggcatcccacaaggctcattctgtcccagaaacctcaagttttctgatttctactctacatcttgtatacattggatctttcttttacttaatgtcttaaataattacccaaggtctcctctctgacagggaaacattgaaacaacctttggaggggccgggcgaggtggctcatgcctgtaatcccagcactttgggaggccaaggcaggtagatcatttgaggtcaggagttcgagatcagcctggccaacaaggtgaaaccctgtctctactaaaaatacaaaaaattagctgggcgtggtggtgggtgcctttaatcccagctactcaggaggctgagacaggagaatcgcttaaatccaggacacggaagttgcagtgagccgagatcacgccactgcacactccagcctgggcgattgaatgagactctatttcggaaaaaaaaaagaaacaacctttggagattcattttaaccattcatttataaaattttaaagatagtctttcacctatagcactagtgattgcctctaaggctctcaatacaagtgtaataaaatagtcatttgtctcagagtacagggctggggcagaagagggcccaaagaaatgcttttataaacatgttaagatctttgtgaaagtaactaattcatgaatctgtttaccttggcagtgtctatagggttcatgatttcatgcctgacgtttttcttttctgctccaatacaaaagtaaatcaggcaaatgcatactagttttcctaaagattcttgaacaaacttttgtacaaaccagtgccaaaagctgcactaaaagtagaggaaaaagagttattctggatgtgtttagcacctataaaatactcaagtaaattgtgactattactttcagtcaaatagatgatcaaagacatcctctccttttgatcctagttgttcagatttctactgccttcctcatcggtagaattcactaggtctatagataaaatctgcaaaaacctcagctatcaacaggcaactccacagccttttaacaatattgctgtaccttattttagcaccttatatttccctgtcactttacaccatgacattcctgcattgaaatcattatgtaaaatgaaatgtgaagggaagcagttgtcaactttagaaagatctgagcatttacacacctggccctttccagtgggcagttcaaaggcaaagcaatctagtcacagagggaggagagttaaactgaaactatgactacacagtgtctttattactttgaagaccaaagggtgtttgatccttgttctaataccagcttcttggtaacactgtataaagtgcactgatgcatctccagcatctacgttagcatttaattcttgctcatctacctttccaaacaatcatgaggagtgtaaataaagaatatattgtatttaataaatgcaagtgacagcatgggaaatatatacttccttttaaaagtagtgttttaggctgggcgcagtgactcacacctataatcccagcattttgggaggccgaggcaggcgaatcacgaggtcaagagatcgagaccagcctggccaacatggtgaaaccctgtctctactaaaaatgcaaaaattagctgggcgtggtagcacacgcctgtagtcctatttactcgggaggctgaggcagaagaattgcttgaacctgggaggcagaggttgcactgaggcgagattgcgccactgctttccagcctggcaacagagcaagactctgtctcaaaaaaaaaaaaaaaagtagtgttttaaatttatttggtcaatatagaagaaatacatgctcattacaggagatttggaaaatgtcaaaaagatgaaagaaattttaaaaaatcacattatacccaccacccaaaagatagccattaataatgtttcaatttccttttgggcttttattcatgcacagtttaaaaaaaaaaaacattgctgtgatcattctctctctatatagtatgtatatacttttgtgtcctattttcacttccaattataacataagcaaaaaatgcatactttgaaagttgatgtgagttcagagtttagtaaaaatatgtgtttcatttgaattggagtcaagactataatattcctttgaacattatacaacatgcttcttcatcattccaccattcccttttgcattgtttaagttgaacattacatcttttctagattttggataatgttatgttttggacagtgaatatgattgctagcagttattttatgacaaaatacattggaattaaaaacattattttattgtatttattttttgagactgagtcttgctctctcacccaggctggagtgctgtggcgcagtctcagctcactgcaacctctgcctctgcctcctgggttcaagcgattctcctgcttcagcctcctgagtagctgggattacaggcacgcgccaccatgcctggctaatttttgtatttttagtagagacaggatttcaccatgttggccagggcagtcttgaactcccgacctcaggttatttgcccgcctcagcctcccaaaatgctgggattacaggcgtgagccactgggcctggccaaaaacattattttaaatctattcgtttgcaccaggtctgacatttatatcaagaaatattttattcgacttattaacatattaccaaagatctagcattatctttaaattgaaataattgtttcttataataataataggcttcagtgaagcaataattttaaaactccatatcacaaatatttattaaactcttcaatgttacatcagttttcctcccacacacccatactgcagtcccagaataagacgcataaggagtagtaatcaagaattaagactttcttgttaaaaactgtcaaaaacttgctacaccagcatccagcgacaggaggagaaatgtctccagtctattacactcccctgcaagccaggttttaatttgttgagaagggggaaaagcctataaaaatcttggcaaaatacagagctgctaatttaatcaattttagtagttaaagcagtgatttcaagtgctaacacaatctgttgaaagaactaatttccaaggtaggggagattcatttatttctactttttcttcccagttttccaatctaaggctatgtgggcagccatcatgcactcactgagacaccccctcccatgagttgagtcttgggccctaactcaatccctgaagaagcagagaaacaggccttcctttcccctggggagggctttccaggtgcagatgaagtagacctcaactgatagatgcctgtagtaatagacacttgcttgagggtgcattaagagctaaaatcatgctgaaccacaagaaagggctggatgcttgctacacactgcccctgagagtgagaaggggtgctctgcatctcccctcattctgaaatctcccaattctcggccaagtgcagtggctcacacctgtaatcccagctgtttgggaggccaaggcgggtggatcaactgaggtcaggagttcaaaccagcctggtcaacatggcaaaacctcatctctaataaaaatacaaaaaaattaactgggtgtggtggtgcgtgcctgtagtcccagctactggggaggctgaggcaagagaatcccttgaacctgggaggcagcagttgcaatgagccaagatcgcaccattgcactccagcctgggcaactgagtgagactctgtctcaagaaaaacaaaaaagaaatctcccaattctcactgcctctcatcattaaatttcctttgcagcagtgtactggcaccatattttgatatattaacagatatgtttctaattcctggtagttcctttatacccccttgaaagctatacaatgagacattaattaccttgagaaagggttgctacagcagaaaaggatttttgagtatgagccaaatcctgaagatctcagagcatgaacaatttagaatattgctaagcgccacctctgaaactagataaagtttacttgggctggaggaatggagagagagaatcagaaggaaagaaggtttagatagcagtaggttcctaagaaagggtcagggaacttcctcaggctgggcacggtggctcatgactgtaatcccagcactttgggaggccaaggtgagtggatcacctgaggttaagtcaggagttcaagaccagcctggccaacatggtaaaacctgtctctattaaaaaaaaaaaaaaaaaaaaagccgggcacggtggctcgcacctgtaatcccagctactcgggaggctgaggcaggagattcgcttgaactcaggaggcagaggttgcagtgagctgagattgtgccactgccctccagcctgggtgacagagtgatactctgtctcaaaaaaaaaaaaaaaaaaaaaaaaaaggctttccccagcttcctctcatacccaacaggcatgaagaaaccaaggtagagggaagctgtgatgcattcccagaaccagaatagagcccaggcaggtttcaacatgccacagtcctctcacccaccatggtgaggacacagaaggaatatctgggttgtgcacctcagcaggtgagacagaggcagcctccaagcagccccctgggcatcagcgtggttcagggagaagcaaaacattttttttttttttttttgagacagagtctcactatgttgcccagggtggaatgcagtggcacgatctcagctcactgcaacctctgcctcccgggttcaagcgattcttctgcctcagcctcctgagtagctgggattacaggtgcatgccaccacacccggttaatttttgtattttttttttaattagagacagggtttcgtcatattggtcaggctggtctcaaactcctgacctcaggtgatccactcatctcggcctcccaaagtgctgggactacaagtgtgagccaccgtgcccagctgaagcaaaacattttccacacacctgagagtaacacagacctggagcaagaacttatgcaccccacctagttttctgcagtccaggaatgatgagggaaccatgaaagtagggaaaaagagtgtatcaagagaggctttgcagttagaagaggccaaaaaaagtacttgggaggctgaggcaggaggataaaaataaaataaaataggccaggtgtggtggctcacgcctgtaattccagcactttgggaggccaaggcaggtggatcacttgaggccaggagttcaagaccagcctggccaacatggtgaaactcagtctctactaaaaatacaaaaattagctggacgtggtggcacacacctgtaatcccagctacttgggaggctgaggcaggagaatcacttgaatctgggaggtggagattgcagtgaactgagactgcaccactgcactccagcctgggtgacagagtgagactctgtctcagagataactaactaaataaatataaataaataataaaataaaataaaaatagccacctgggccaaagacagaagaatcagataggacgtggtacatgttggcagatgccagcatggtctgatgaacaacggcaagacactacctgtccccaccctgatgctgtgccactaggtaagtccccagatctcagaggaaaagagcagtgggaaccctaaactgactaatatttgatatctgccacgtagcagaatgacactcttcgagtgcaaaagagaaattaagtcttggaaaaatggaaaaaggtatatttcttgcaaaactgattcatgtcatgagatttatggtggtcacatgtatcccatggaatttccaatatacgtataccataggcaaaaagactttgaaaaaatgtcacagtattagactttgaataagagttggacatcatgcaggagtgtgaagaaaagaacatctttgttgttttctgatcaatatcaccttcagactggaattacagcttcactctatttcttcgggggtggggtaactattttccttagtttgttcaagaatggatcgaccaattaatcaaaattttagaaataactggaggactgtactatgctgcctgctttcattaactgctcagttggtggactgacaaagcactgtaatcatttcttcacaattcccatggtaaagtcatcccaaatgtcaccagcatcattcacttccccatcaactgccacgtctctgccgtgtcatgatgacctgggataaaggctgtgggtggggacaagggttgtcacaagttgtagattagacaaaccagaggggacctcagaaaagcatttattttggttctggcttccaagcaggtctgcagccagatcgttcaagagaacgattgtctatcctatgtttaaagatccccaaagaaggcaatctctagtaagctgttttaatatataaaatctatattttgagaagtttcctccttttatcaaatctaaacccatctctttttgttttcgtcttagcggtaataaaaatacatcatatgattctgttctgaaatcctgttttgggcttatagataatatttattctgctagagatgttggcccttttagaaaagagtttctgggccgggcacggtggctcaagcctgtaatcccagcactttgggaggccgaggcgggtggattgcctgagctcaggagttcacgaccagcctgggcaacccggtgaaacactgtctctactaaaatacaaaaaattagccgggcatggcagtgtgcgcctgtagtcccagctactcaggaggctgaggcaggagaattgcttgaacccgggaggcggagattgcagtgagccgagatcatgccactgcactccagcctggacgacagagcgagattcagtctcaaaaaagaaaaaaaagaaaaaaaaagaaaacagtttctggtttaaatggggattttgtaacttgctgtctcagaggcagattcctgatgactaatggggtgattttttttttttttttgagatggagtttcgctcttgctgcccaggctagagtgcaatggcgtgatcttggctcactacaacctctgcctcctggtttcaattgagatggggtttctccatgctggtcaggctggtctcgagctcctgacctcaggtgatccacccaccttggcctcccaaagtggtgggattataggtgtgagccactgctcctggcctaatggggtgattttatgcagtgtgagagccagtagctgggtagctggatgcttgtctgaagtgctgcctttccctcaggcactgcttgtgtggagatacccaggagaggaccagaaagagctctcctgttgtgtcagctgtgaggaaggaagggagaaacaagaagtgaaacctgaggcaggacaccctattacgtggcacagacagggtcacctcatgggcagtagctgtgacaggggacgccagagcagagattttggtggcaaaataccttgaagtcctgaactttgaagtcctatatgaaaatatcttgaagttctacgtgaaccttagatggacattactctaagacaaggatttaagatgagttacaaaagagtattccattctagcatggcaagaaacccgggcaaagattattaagtgatcaataaagctaaaggttagtggaaaaatgtagtaaagtctacacaggtacttgtgagctttgtttttcccaatgatatctttaattaaatgagtaatgtccgccgggcgtagtggctcacacctgtaatctcaatactatgggaggctgaagtgggaggatcatttgaactcaggagtttgaggctgcattgagcctttatcatgccactgcactccagcctggtcaacacagtgagaccctgcctcaaaaaaaaaaaaaattagttgggtatggtggcacacacctgtagtcccagctacttgtgacactgaggcaggaggatcacttgagcccaggagtgcaaggttacaatgagccatgatcacaccactgcactccagctttggtgacacagtgagatcctgtctcaaaaaataaaataatttttaaagcaacattgaaatacattctcatcgtaaaaaagtaagcattagaattatggctaatgggcccggcacagtggctcacacctataatcccaacactttggaaggctgaggcacgcagatcacaaggtcaggagtttgtggccaatagggtgaaaccccatttctactaaaaatacaaaaattggctggctgtggtggtacgcgcttgtagtcccagctacttgggaggctgaggcaggaggatcgcttaaacctgggaggtgaaggttgcagtgagctgagatcacgctactgcactccagcctaggcgacagaacgagactcccatctcaaaaaacaaacaaacaaaagaattatggctaatgtcctctttgaccatttctttccccctacaacttccccagcaccccccatcctaatagtcaccctagagaagggtcattctgtgtttgggagataactttctgcttttctggccagtacagcctcttcctcttggggtaaaggaagataacgggtaagatggcgaggatgagtcaatatttcctctattcttggacacaggttcaaaagagaatcattgggagtttctcagtccaaccaaatcatgatgcaatccggaaaaagaacctaaaattttggcatgtagtcttcatttttcaatttgcagtatcaatgccgatttgtttttttgtgtgtatatctttacaatttttttttgtttctttaggatttttttttttttttgagacagagtttcgctgttgttgcccaggctggagtgcaatggcacgatctcggctcaccgacctccgcctcccaggttcaagcaattctcctgcctcagcctcctgagtagttgggattacaggcatgcaccaccacgtccggctaattttttgtattttcagtagagacggggtttctccatgttgaggctggtctcgaactcctgacctcatatgatccgcccgcctcagcctcccaaagtgctgggattacaggcgtgagccaacccgcccaggcttcttcaggcatttttcaaaagaaattaagggaaggtacatcaagcccaactgatctgccatcattaacctggaagcttttcattcaattttatgtgtcatcaatcttggcttctaatctctggaatattgtgataatttcaaaatgatctccctatttctctatctcctcatctacccatctttcttctctcaactcccttccctctaattcatccatagtcatagttataaaacatcattgttagccagatgtggtggcccacgcctgtaatcccagcactttgggaggttgaggcaggtggatcaactgaggtcaggagtttgagaccagcctggccaacatggcgaaaccctgtatctactaaaagtacaaaaattagctgggcatgggggcgggcacctgtatcccagctactcaggaggctgaggcaggagaatggcttgaatgtgggaggcagaggttgcagtgagccgagatctcaccactgcactccagcctgggctacaagagcaagactctgtctcaaaaaaaagaaaaaataataaaaaataaaacatcattgttattttatcaatcttcagcagcttttcattgcctacagaatggagtctcagttcctcaggttggcattccacaatctgattccaaaatgtgaatctatacttaaactactcactactcaaacttcattccaaccattgttcctgaatgttctgtgtgttatgcctatcttgacatcaatactccaacctttacctatctacattctgttcccttcatttctctgagttccatctgtctttcagagtagtgtgctagcactgtgtgtcacacagaaatgaattttacaatgtagaaatcctgtactcatttgcagtacaatttgacagtacatttcaataaccatagaagtgttcaaatccttgggctcagaaatcccactcttgagaatttattctctaataaacagaaatagaggaaaggttaagtcaattatggtacatgtacttaataaaatagaatacagctatttaaaattataactagaagcactatatagcttatgaaaatgcttatgagtaattaaagaaaaacagagaataaaattgtgattaaatctggaaacctggaaagggaactaaagaaacagttgaactaaagaaacagttgatttgtggggtggtgggaggttacgttattctttttcttttatttggattcccttgatgccatcctttttttttttttttttttttgatgaagaaagtctccctctgttgctcaggctgaagggcagtggtgcaatctcagctcacggcaacctccacctccgcttcctgggttcaagtgattctccggcctcagcctcccaaagtgctcggattgcaggcatgagccactgtgcccggccccttgttgccatcttaacactgttcttatgatatataattgtgacatataattgctgttcttggccaggcgcagtggctcacacctgtaatcccaacactttgggaggccgaggtgggcagatcacctaaggtcaggagttcgaggccagcctgaccaacatggtgaaaccccgtctctactaaaaatacaaaaattatctgggcattgtggcgtgtgcctgtagttccagctacttgggaggccgaggcaaaagaattgctggaaccagggaggtggaggttgtagtgatccgagatcacgccactgcactccagcctgggtgacagagcagactccatgtcaaaaataaataaatatgaaaataaaaaattgctttaaagagtaatgtagagttcttatttaaactatctgatcagacatatgaattgaatctttctcctcttaagagttcttagcattggctgggcgcagtgactcacgcctgtaatcccagaactttgggaggctgaggcaggcagatcacctgaggtcaggagttcaaaactagcctggccaacatggtgaaaccctgtctctactaaaaacacaaaaattagccagcagtggtggcatgtgcctgtaattccaggtacttgggaggctgatgcagaagaatcgcttgaacctgggaggcagaggttgcagtgagccgagattgcaccactgcactccagcccaggcgagagtgagactctgtctcaaaaaaaaaaaaaaaaaaaaaaaaaaaaaaaaaaaaaaaaagagttcttagagtttagcaaggttgcaagatacaaggtcaatatacaaaaattctatttctatgtacttgcaatgaaattttattaattgaaaaattaattgaaattttataaagtatcatgtataatgccaccccaaattaaaatatttagggataaatataacaaaaatgggcaatatgttttgcaaaaaactataaaacactgatcacagaaattaacaagacctaaataaatggaaagatatgccatgttcaaaggctggaagatacaatattcacatgtcaattgatctatagattcagtgcaattccaattaaagtcttagcagtcttttttggtagaaattgataagctggccaggcgctgtggctcacacctgtaatcccagcactttgggaggccgaggtgggcagatcacgaggtcaggagatcgagaccatcctggctaacacagtgaaaccccgtctctactaaaaatacaaaaaattagccaggcatgatggtgggcacctgtggtcccagctactcaggaggctgaggcaggagaatggcgtgaacccaggaggtggaggttgcagtgagccaagatccgtgccactgcactccagcctgggtgacagagtgagactccgtctcaaaaaaaaaaaaaaaaaaaaaaaagaaattctacctggaagaatagctaaaacaatttggattaaaaagaacaaagttgaaggactcacactacttgatcacaagatttactataaagctggacagtgatcaagacagtgtggtattgatataagggtagatatagatccatggaacagaattgggaatccagaaatagacccacacatctatggtcttttttttttttttttgagagagggtctcgctctgtcacccatggtggagtgcagtggtgtgatctcggctcactgcaacctccgcctcccaggttcaagctattctcctgcctcagactcctgagtggctgggattacaggcacccaccaccacgtctgactaatttttgtattttttttttagtagaaacggggtttcaccatgttggccaggctggtctcaaactcctgaccttaagtaatccgcccaccttggcctcccaaagtgctgggattacaggcttgagccaccatgccccacctggtctattgctttttaacaaagtgccaaaataattcaataggaaaaagatagtctcttcaacaaatggttctggaatattcaacatctacctgcaaaaacaaacaagcaaacaaaaagctgactttgattcttttccatgtttttaaaattagcccaaaatttaagatttttagggaatagattataggcctaaatgtaaaatctaaaacatctagtagacagtcttgtgaccttggggtagggaaagatttcatagataggctgtaaaaagtataaatcatgaacctttttttttttgagacacagtctcaaaattaaaatttctaacattgttagaaaataaaaagacaagccaaaagataaaagagcaaattgggagaaaaaacttgcgaagatatagctgatcaaggatatataaacaacactttacccatatatttacccataatatacaaataatattttctttttttgaaacagagtctcgctctgttccccaggctggagtgcagtggcgcaatctcggctcacggcaatctctgcctcccaggttcaagcaattctctgcctcagcctccggagtagctgagattacaggcacccgccaccatgcctggctaatttttgtatttttcctagagacagagtttcaccatcttggctaggctggtcttgaactcctgacctcgtgatccacccaccttggcctcccaaagtgctaggattacaggcaggagccaccacacccggccaacattttcaattcaatagattaaaaaaaggcaacccccaccccactcaatggacaaaagagttgaacagacactttgcaaaataagagaaacaagtgtttaacaaatacataagatgcctttcaccataatttactaggtaaaggcaaatttaagccacactataatgacacacctactagaatgactgaaaatttttgaaacttacaataccaagtcctggagaggatgtagagcaactggaactcttagacattgctgatgggaaagcaaaatagtatattctctgtggaagacagtgtggcagctcctttggaagttgggcatacattttccacacaactcagcaattctactccaaggcgttttcccaaaataaatgaaaatacatttccatagaaagaactgctagcaaatgtataccagatttgtttataaccaccccaaactggaaaaatccaaatgtctatcaactggggacggataagcaaattgtgatacatccatacaatgaaatgctacatagcaataaaaaggaatgaactaccaatacattcaatgacatacataaatctcaaaacaccatggtacgtgattgaagtgacactcaaagggctatatgtaatattatttcatttatatgacattctagaaaatcaaaaccaaagggacagttacgagattaatgattgccagaaaatggaagtgaggataggggattgggtacaaaggagcatgagagagcttttgggggtgatggatatgttccgtatcttgactgtggtggtgactgtgtgactctgtacatttttgaaaactcattaaaacatactctgaaaaagagtacaacttaactccatgtaaattatgtccccataaatctgattccaaaattgaattctgcatactgatagcattggcattacctgggatgttgtaagaaatgctgaaccccaaactccatctgcatgcagaccttgtgttgtaggtcaggttccccaggaaacaggccctaagattctgaaagctgcatacaggaggtttattaaggggagaatttagagggaacgaagtaggattgagtaggattgaatccatctgcagtgcaatttgacagaagcctcagctgagcctacagggacctctggagctggaattaccttcagggtaggccctctcatcaagcagtcattggatgtgactgcccccaaggtctgaccttggttgggcaaggtgattctctttagctgaaggaaatttccagagaatgactcagctgagaaccatcagctgccaacactcccggcagctgggtaaatgagagcctccatcctgaaaagagaatctgggcaactcaccatagcacccactacagtgcactccttgcaccttttgagtccacttgtttcatagaataagttcactccatcttggaagagttccttcagggttcttattggtctcttttcctaaggaaacttgtaaagacagtgggatgaaccacatccttgcccccgccaataccacagctggtgtcaaggtcacaatcaatactcatcatcttccttctctactgcccattccagattacctctaccctcaaccagcacctcttctggtctaactggcctatctgagagatggaccctgatccttttccatgagcagtaggagtccctgattattatatctttctttctcaggctgtgatgctgcatttttctgttaatgtcaagattgaacaggggatgccaggtgcagtggctcacacctgtaatctcagcactttgggaggccaaggtgggtggatcacttgaggtcaggaatttgagactaacctggccaacatggtgaaaccccgtctctacaaaaaatacaaaaattagccagacgtggtggcagatgcctgtaatcccagctacttgggaggctgaggcaggagaattgcttgaacctggtgggtggaggttgcagtgagctgagatcgtgccactgcacgccagcctggacgacagagcaagaccctgtctcaaaaaaaaaaaaaaaaaaaaagattgagcaggggaatatcaagagaaaccccagtggattacttgggtgccagacttactcttccctgcctccatcatgtgacagcagtcctatctcctcctgatgagggcaattcctcctgacaggatgatgactcatttccttgcctgctggtatcctggtataaagtgcctaatgtgactgacagtttactagaactcttgtgtcccctggtggaaatattttccctctgggattgaagacttctagatccacagaacctagaagcacaaattccctaagtgagctattgggagggatgataaacagccactcctacttctaccctttggttcccagactcacacattctaccgttttagggacacagcactatataacgggcactgacttagggtatatactgcattctgtaggacgccatctatcaactctaagctggtgtctcagctggctttcaaaggccatcccattactgtcaggccagatgtctctgggtagcatggaatacgataggacctctggatcccatggtaaagtgtcctactgacatacctcctttactgttaagtggatcccttgagccaatacaatgttttatgggttcccatcatggtgagtgaagcactataaacccttggacagtggtgctagatgaggcaacacaagtaagaaaggaaaatccagccaggcgaggtggctaatgcctgtaatcccaacactttgggagaccaaggtgggtggatcacctgaggtcaggagtttgacatcaccctgaccaatatggtgaaaccccatctttactaaaaatacaaaaaaaattagccaggcgtggtggcatgcgcctgtagtcccagcaacttgggaggctgagacaggagaattgcttgaacctgggaggcggaggttgcaatgagccaagactgtgccactgcactccagcctggacaacagagaggactccatctcaaaaaaaaaaaaaaaaagaaaaagaaaaaaaggaaggaaaatccatacccaggatatacgttgattgccaagaagacagctcattgccccttttaggatagcagggcaatcaatactgtggttgcttggtctccttaaggcatattgtgatattgagggcttatttttggtctctgttgcttgcagactgaacattcagcactagggtaagttacagcagcctttataaatgacgttgggcccttgagtagcttctatcctttccaatgtggatactcactactatggactaaatgtttattttcccccaaaatgtgtatgttggagccctagcccccaatatagctgtatttggagatggggcctctaaagaagtaattaaggttaagtgaggtcataagggtggggccctgatccaaaaggattagtgcccttataagagacatggagagcacttattcttgcatgtgcctgccttcccctccacctcccatgcactgaagaaagggcatgtgagcacacaggatgaaggcagccatctgcaaccagacaccaaccctgctggcagtttgatttttggactttctctagaactgtgagaaaacaaatttctgttgcttaagccacattttttgtggtattttgctgtagcctaagtggattaataaactccatttatgagcacactgtgccagccctgtgggactggtagcagctagctgggtcattctgcctagtgcactcctattgttcagtgcctctcccatggtggctgctaggagcaggtattagcatgtgatgcaaagatcttcacatttcatgtccattcctgtagatctatggacctatatcttccccataccccaggcctcccatattctaatatttctctttccaggcctctgagcaaccaatgaagacattcactactgccatgagctcatatatacttttgcctcgagccatgtgtctctctctacacaaagcagatgatcagcacactccccaaatctctaaacattgggaggatttcctgtcacttcttatttcagggctagtcctgagagagactgtagttagcagagtttgttttcagcttgtaaccacatcagagtataacttgagccatccatgaaccagtctcggtattgttcctccttggccagcatggtggctcatgtctgtaatcccagcactaagggagtctgaggcaggcagatcacctgaggtcaggagttcaagaccagcctggccaatatggcaaaaccggtctccacaaaaatacaaaaattagccaggtgtggtggtgcgcgcctgttattggggctggcataaacctcacatgacgcttttttttttttttttttttttttgagacggagtctcgctctgttgcccaggctggagtgcagtggcacaatctcagctcactgcaagctctgcctcctgggttcacggcattctcctgcctcagcctccctagtagctggggctacaggcgcccgccaccacgcccagctaattgttttgtatttttagtagagacagggtttcacctgttagctaggatggtctcgatctcctgacctcgtgatccacccacctcagcctcccaaagtgctgggattacaggtgtgagccacctcacctggccaatgcattttcttcttttttgagacagagtcttgctctgtcacccaggctggagtgcagtggcaccatctcagctcactgcaacctccacctccagagttcaaaccattctgtctcaggctccgaagtagctgagattacaggtgtgtgccatcacacctggctaatttttgtattttcagtagagacgaggtttcgctatgttggccaggctgatctcgcttctaaaactatatgatataatgggtcgcatggcccaagaagcaggactgctcatactgtaacctgaaaccactatggagccctttcctgccctaggcctcatacaatgctggtagatttccttgtcacttggtaaggtttaaagcagtgttcctaagtaggtaatatgctgccaccagagcccaaagaagcctggtaggcattatgcttgcttcttagtcgtgggaagtgcaagatggaataatttgacctttactttggaaggagatatcctagtatgcctgaagccactaaaacgtcactactgtggcaggcccctgaatctttatagaaccctctggaacacatgtcttatccaggcctccaacaagtatttgtatttcttgctcatctggtccaaataatataatgtcattgatatagtgggccaatgtaatattctggggtgttcagatggtcaagttcctttcagaatttatttctacagaatgcaagagagttaacacaaccccagggcaagactgtaaatgtatattgttgtccatctcacacgaatgtgaacttcttccagttaggaatggataagaatgcggccgggtgtggtggctcacgcctgtaatcctagcactttgggaggctgaggcgggtggatcgcctgaggtcaggagttcaagaccagcctggccaacatgacaaaaccccgtctctagtaaaaaatacaaaaattaaccgggcatggtgtcaggcacctataatcccacctactcaggaggctgaggcaggagaatcacttgaacccggggggtggaggttgcagtgagccaagattacaccacttcactccagcctgggcaaaacagcaagactccatctcaaaaacaaacaaacaaacaaacaaacaaaatgcattggccagattaatggctaataccacacacctaaagccatgttaatctgctctaacaaaaataccatttgtaacccagcaagcacaactggggctactccttggatgagtttgccacatccttcaggatctgaagttcctgcatttctagcatttctatttcacttaacagtggaccactgcattctggttaaggtcagaattaagtggggaaaacattagtcctgcattcgtgaagtcttcaaaggtggctttaatctctgctgtgttccctggagtgtaatactgttttttatttactctcttggatggaggaggagggagtagttttagaggtttctacttggcctcctccactatgatagccctactcttatagtctaaagaagaaattattgggagaagcaatctaccctggattctgagtatccctgcacattcctgctaatatgctgggaagacaagaccttgacttctctctacttaggagatttctcagggttgtacacacagcaataaaccttgagagatgagctaacatctacttccaggacaaagagtagacttgcatactgcttataaaaatagtggattcccggccaggcgcggtggctcacacctgtaatctcagcactttgggaggccgaggcgggtggatcacgaggttaggagttcgagaccagcctgaccgacatggtgaaaccccgtctctactaaaaatacaaaaattaggctgggcgcggtggctcacgcctgtaatcccagcactttgggaggctgaggcgggcggaacacgaggtcagaagattgagaccatcctagctaacacagtgaaaccccgtctctactaaaaatacgaaaaaattagccgggcgtgttggcaggcacctgtagtcccagctacttgggaggctgaggcaggagaatggcgtgaacccgggaggcggagcttgcagtgagccgagatcgcgccactgcactccagcctgggctacagagcgagactccgtctcaaaaaaaataaaaataataaataaataaataaaaatacaaaaattagctgggcatggtggtgggtgcctgtaatcccagctactcaggaggctgaggcaggagaatcgcttgaacctgggaggcagaggtttcagtgagccaagatggagccactgcactcaagcctgggcgacagagtgagactctgtctcaaaaaaaaaaaaaaaaaaaaaaaaaagtggattcccatacaaaggaatgcgatcatgtcctttacagggacatggatggagctggaaaccattatcctcagcaaactaacgcgggaacagaaaactaaacatcgcatgctctcatttctaagtgggagttgaatgatgagaacacatggaaacatgatggggaacaacacacactggggcttattggagggggtttctgggagggagagcatcaggaaaaatagctaatggatgctgggcttaatacctaggtgataggttgatctgggcagcaaaccaccatggcacacgttcccctttgcaacaaacctgcactttctgcgcatgtaccctggaacttaaaagttgaaggaaaaaaaatcctctgcatcgcctctatgggaactgggggcaaggggaacagatgcagacatgacactgatactgcttgctgtggtctgataaagtcctttgtctctgacccaagagtctcatattcaaccaacaaacatgaaacaataacaggctaatggtttgtaaggagggtaaaatcctagtccctgacagcaatgatggggagcagcaatgatggggagcagcaatgatggggtggttcttccaactcccaagtatttccatgtcatattacattggcattatacatctggagacagaaaatcaggtgggtctttggacccaccgtgaactagacctgggtcaaaggctccatgtattacctagccccaatatactcccactttaacagggagaccacagtgacgctttgggtctccaggcatcagtgttaactcaggccttatatccaacagccctcaaaatggttgggaattaccctttcctgaggaaatggccattggtttccttggagaaggattgggggaatcacgatcatatacatttgctgtggcacttcttcctggaaacctactctctccttcagtcaagttctgggttctgggttattggggtgactgccctcaaactcctaatcacccatctttgatttcttctggttgtacatattgaacaattggctttttggctgctccatcgatcttgcccccgggaataaaatgttcttttttctttccatctggcacttttattgtttcactttttctgtttgattcatttgagtaatttgggggtgtgatatgaaccatggctccagtttatatcttgatggctttccaattgcttcaccatcacctgattccatcactggatttattcttttagtgaatagtacatctgttccccattgatttgaaatggcatttttgttaaatgctaacaattaattttttttcttttttttttttttttttttttttgagacagagtctttgctctgttgccaggctggagtgcagtaacgtgatcttgattcactgcagcctccgcctcccaggttcaagcgattgtcctacctcagccgccccagtagctgggattacaggcacgtgccaccacgcccagctaatttttgtatttttagtagatacggggtttcatcatgttggccaggatggccttgatctcttgacctcatgatctgcccaccttggcctcccaaagtgctgggattacaggcgtgagccaccacgcccagccaaaacttcatattcttattaattttctccatagctctccttggatcaggtcctccctggtgtcactcattatgctaattgtgcccagcttgcatctgagggttaaatgctatctcctgggatcctgcccgttactctcagggagcccagttctgtggcagcatttgctaccatgaacactgacccatatgtaacagctacagtgagtttcccaacacgccagtgtccctcagtcagtgcattcctcattgctttctaaatacagtgccctctagaccctcccatgccatagtagtctggcattatgcagaatatccactctaatgtgcccactgcattcagccttttgatcccttcctccaccatggtccatgatagttctagcatttctacttcacttacaatggatcattgctttttccaaactttgagaggctaccaagcagcttaagagcaccatcacctgggatcttcaatagttgttaaatcttgtattatgggatattggccccacatcgatagactctgttatccaattttattcagtgctccttgatccaccaccctcaagatatagtgccagatgtactttgctggctcctgctggaatctatgatctaggtcctgcagctcctttggcgtatactggacctgaacatgatagagaacccaaccttctttggaactttgctgctcttataatgaaggcccgctcctgttcctcagccttttctgctcgcctgttgcaggcgatgagtctctttatatgctgccaaggagggcctctggctttcacacttcaacttacaggtgattaatgaccctcagcctttcatgtctttctccagtgcagcaagagccagaagaaacagccatctaattctcaagtccttatcttaatataattactattgcccttgaaactctcaaattcctctctagtctattatcttccatcagtttcccattccagttccctgctgctgggaggttttttgttgctgttttggtttggtttggtttggtttggtttggttttcttgtttctttgagacagtcttgctgtgttgtccaggctggaatacagcagcaccatctcggctcactgcaacctctgcttcccaagctcaagtgatccacctcagcctcccgagtagctgggactacaggtgtgtgccaccatgtctgcctaattttttttttttagatggagttttgctcttgctgaccaggctggtggtgcaatggtgcaatctccgctcagtgcaacctccaccttccggtttcagccaattctcctgcctcagcctcccgagtagctgggattacaggcacccgccaccatgtctggttaatttttgtatttttagtagatacggggtttcaccatgttggccagtctggtctctaactcctgaccttgtgatccacccgacccggcctcccaaagtgctaggattacaggcgtgagacactgtgcctggcaattttttttttttttttttttggtagagatggggttttgctatgttgcccaggctggtcttgaactcctgagcacaaacaatccacccgccttggcctcctaaagtgctggcatctggccggaagttttaataatcacaccacaacctcctgccacgggttttatcaggtgtttattgtaagccagctgttgggtgaaacagctccataatcccattttagaatttgcttctcatgataactcctgataccaactgacataaattaggttccctgggaaacagactctgagtctgaggtttactctgagtcatgtgggaaatttatttgggagtgctttaggaacagggctgccagataaaatatagcatgcccagtgaagtttgcatttcaggtaaacaaagagtgcaatatttgggactgtttatattaaaagttattcttgtttatctgaaattcaaatttcactggacgttcggtgtttatatttgccaaatctggcaacttctgtctaaagaacaacacctatgagaagtgaggaaggcaagcttgtgaagggggagacgttgaagtatgaagcatttggaggagaggcttcagctgagtctatggtgaggtctataggttggagagcccttccaagctgccctgggtcaggctcggtggctcccacctgtaatcccagcactttgggaggccgaggcgacggatcacctgatgtcagaagtccaagaccagcctggccaacatggtgaaaccccgtctctactaaaaatacaaaaattagctgggcatggtggtgggtgcccgtagtcccagctacttagaaggctgaggcaggagaatcactggaacccaggaggcagaggttgcagtgagtggagattgcaccactgcactccagtctgggcaacaaagcaagactctgtcttgaaaaaaataaaataaaattaagaacaataataaagctgccctgccttgaggaagggggcctaggacttcattttcccacatcaaccagccattggatggaggctgcctcatatcagggaacatgatcttgggtgagatagctctcttcctagaggtattcagctgagggctttcatctgccaacacccccagcagactggggaatgattgcctcagtgccaatatggggaaatcccgatctgaccattgcatcagtacacctactgaaccagaatctgcactttaacaacatctccacgtgatgtttatgcacattaaagtttcagaagcattggtttaaggctggttctccaacttttgtgtgcatcagaatcgcctggagggcttaagcctcagctttctgggccccacccctggagttactgattctgtaagtctaaagtccaaggatttgcattttaaaaaaaattcccggctgggcttggtgattcacgctttaatcccagcactttgagaggctgaggcaggtggatcacttgagatcaggagtttgagacagcctggccaacatggtgaaacatctctactaaaaatacgaaaattagccaggcgtggtggtgcatgcctgtaatcccagctacttgggaggctgaggcaggagaatcgcttgaacctgggaggcagaggttgcagtaagccaagatcacaccattgcactccagcctgggtgacagaacgagactctgtctcaaaaaaaaaaaaaaaaatccccgagtgatactgagctcctgctggttcacggattacacttgaagaacgactggctccaaatatacagacatctaataccttataacctggaggcaggtggctactgcagctggttcagctcctctacaatgctgtcaaggacacaggctttttccctttatgctctgccatcattagcatattagccctttgtcttcatgctggtcatttctggtttcaagatggctgccataactccgggtatcacatccgtggtcaaggcatgagggatggcaacaggcgagcaccagctgtgaattatttcttttctgaagaaacaaaagtatttttggaagtccctcactcctgcagattctttttttaatttcataaatccatatcgttttaattatttcagaagcatgtgtgatatattcatgaagtgagttaatttagagaggacaagaccaacccatgtcttcactaaaaatttcacagaaaccccaaaaactacccttcatgactgccactcattcctaggaaaggaaaggaaatgaaataaatccaatcccaagtgaggaataatcaaatatgattatatgtgtatttatatataaatacacatataatatgtacatatatttaatatgtacatacatattagtaataaatacatatatttcagtaaaggtgcccaaatctgactaacttctccttcaactctattatttgaaaagaaaccaggtcagcacaggggctcacacctgcaatcccagcactttgggaggccgaggtgggtcgatcacctgaggtcgggagttcgagaccagcctggccaatatggtgaaaccccatctctactaaaaatacaaaaaattagctgagcatggtggcacatgcctgtaatcccagctacttgggagactgaggcaggagaattgcttgaacccaggaggcagggttgcagtgagccgagatcatgtcattgcactccagcttgggcgacagagtgagactctatctcaaaaaataaaaagaaagaaaaagaaagaaagaaagaaaaagaaagaagccaaaaaaacacatcttgatgattttctacaataattttttgcttagggttttgttttctgctatttttttttcttaaaggaacgaagtttgcaggtttatttttatatgtcactgtccagaacagagtttatgaccactctcattgcaagggaggctggaaagatgatgtctagtcatctaaactttatagtaagaggtggcaagtgagaagagggttgagaatggctgctaagttaaccacaaacattttatcttgagctgtggaagtaatcaataccagaaacctttaaaaaagaagttggttgttgggagtgggactgtgtgtggagagtggaggggtgggacactggtttttcatagcaacatcttctatacaatttgatttattaccatgttcattataaaacccaccactccactctttctcatactccaccttagaaaagcttgttggctcaaccgtcaaaagatttctagggctggttgcagtggctcatgcctataatcccagcactttgggaggtcaaggcagatggatgaaatcaggagtttgagaccagcctggccaactggtgaaaccccatctctactaaaaatacaaaaattagccgggtgtggtggcgtgtgcctgtaatcccagctacttgagaggctgaggcaggagaattgcttgaacccaagaggtggaggttgcagtgagccaagatcgtgccactgcactccagcctgggtggctgagtgagactctgtctcaaaaaaaaattttttttctagaatttataatgtcttgtcatctccactaccaccatcatcatcactgcttctgtccttggtctgttagaattcataatcaacagagcagtcagtgctcctttaaaaaatctctcttctgggctaggcatagtggttcatgcctatattcccagcattttgggactctgaggaaggagaagcactggaggccagaagttcaagatcagcctgcgcaacatagcaagaccaccgcccaccaccaccaccctgcatctgtacaaaaaataagaaaaatttagctgagtgtggtggcatgcactttagtcccagctgctcaggagtctgaggctagaagattgcttaagaccaggagttcaaggctctgcagtgaactatgatcacagcactgcactccagcctggaaaacagagaccctgtctcaaaacacaaaaaaagaaacaaacaaaagccccttctgtgctcaaaaccctccagtcacttccccctctcacttaaggttaaaataaaaatctttgcagtggcctacaagtcctcccacatgaccttctgacctcattttcttttcttttctttttttttttttttgagatcaagtttcgcttttgttgcccaggctggagtgcaacggcacaatcttggctcaccgcaacctctgcctcctgggttcaagcgattctcctacctcagcctcctgactagctgggataacaggcatgcgctaccacgcccggctaattttttgtagttttagtagagacggggtttctccatgttggtcaggctggtctcaaactcctgacctcaggtaatccacccgccttggcctcccaaaatgctgggattataggcgtgagccaccacacccagccctaacctcattttctccccctgtccattacactccagccaccctggccgcttgaatattcctcaaacacatgatcacgttcccgcctcagagtcttatttgctattctctctgctgagaacatctgcccctgttcctggagcattcttacccagtctcctccaaatattcatccccgtggctcatccctcacctccctcctgtttttattcaaacaacatattctcagtgaagccctccttgactacccttgaccgctctatttaatagcacaacatgtcccccacctcctgctttctttttattctaagcacatgccaccatctcaagcactatgtatgcagatctttgtttatgatctgcctctgtctctagaatgcaagctcatgagcataggggtttttgtctgttttgtgcactgctgtatccctaggccctaaaacagagccgggtacataagaaaccctcactgaatattggaggaaatgcaaaacctcaaaagaattattagaattttttcttttttttttttgagagatggcatctcactctgtcacctacgtgttggggtgcagtgacacgatcataaatcactaaagcctcaaactcctgggctcaagggttcctcctgcctcagcctcccaagtagctagaaatataggcacacgccaccatgctcagctaatttttctttttctttgcctttctttttttttttttttttttttgagacagagtttcacccttctcacccaggctggagtgcaatggtgccatctcagctcactgcaacctccgcctcccgggttcaagtgattctcctgccccagcctcccgagtagctgagattaccagcacctgccacctcgcccagctaattttgcatttttagtagagatggggtttctccatgtgggtcaggctggtctcgaactcctgacctcaggtgatctgcccgcctcggcctcccaaagtgctgggattacaggcatgagccaccacgcctggcaaattttttaatttttcatggagatggagttgtcactatgttgcccaggctggtcctgtactcttgggctcaagcgatcttcctgcctcggcctccccaagtcggcctcccaaagtgctgggattacaggtgtgagccactgcaccccagcatatatttctttttaaaggtaaacatatgtattagagttcttcagagatgcagaaccaaagtaatgcagaaccaataggatatgtatacaactgcgtatatacacctgaattctattggttccgcatttccgaagaagagatgagagagagatttattttaaggaaacagttcacatgatactgggggctggtaagactgaaatatgtagggcaagcagcaggctgcaatttcagtgaagaattggtgttgcattgcagtcttgagtccaaattcctgaggtcagcagactggaaatcaggtagggcttctatgttgcagtcctgaggaaaattcttctacaggaaacctcggtgtttgctcttaatgccttcacctgcttagatgaagcccactcacattacagagggcaacctgctgtcctccaagcccactaactgtaactgtcactcacacatgaaaaacaccttcacagcaacgtctaggctggcatttgaccaatcgactgggtaccatactccagctgggttccaggttgacacatacaattaaccctcacagcacagagaagaaaaataaagaaagctacacaattcctattctttttttttcttttttctttctttcttttcttttttttttttttttttttgagatggagtcacactctgttgcccaggctggagtgcagtggggcgatcttggctcgtgatcttgactcatggcaacttccgcctcctggattcaagtgattctcctgcctcagcctcccgagtagctgggattacaggtacccaccaacacgccaggctaattttttgtgtttttaatagagacagggttttaccatgttgcccaggctggtttcaaactcccgaccttaggcaatccacctgcctcggcctcccaaagtgctgggattacaggcatgatctaccatgcctggctaatttttgtgttaaaaatacaaaaactactaaaagtagagacggggtttcaccatgttggccaggctggtctctaactcctgacctcaaatgaaccacccgccttggcctcccaaagtgctagcattgcaggtgtgagccaccacgcctggcccacaatccctattcttgaggggtgatgggaaagacagtaggaaatacagacgaatataacaaatgccatgttacagaagcacaaggaaagttctgtggaagggtagagtttttggtggggggccagctgggacgacttcataaggaagtggtctttgagttcagtcttgcaggatacacggaatttcgataggaggaaaaggcatttttcagactactgaaacctagagcctgaaaatgcttgacacatttggtaaatggccaaaagtcttcaggaagcaaactcttgctaccgtagcatctgcttcctgtacctccaattcaatgctaacattatgctgccttaatttgctcattatatttattttcccatgtagaagtcttgattctccattcttgagaacaggcatattatacttttttatccctaatagttcccaggtcatagaaaatacttaaaattgtatctaactaaaagtatgtggctaaggtgaacttgcctgtccatgctcctatcttctgatataatttttctttgcacaattgctcttctggataagtctgtgtagtttaagtctacctgagccgtaccgtgggatcaggagtgggtgcatgatacagctttatcccgtcgctctcagaaataggggcaggctctgctatatagtctaggctctttctgtggcaagcagtagcaaccaattcacacagacttaagaaacaaaggggattactgcacgaagaaatcagaaatgacacaaacaaatggaaaaacactccttgcttatggataagaataatcaatttcatgagaatggccatactgcccaaagcaatttatagattcaatgctattcccattaaactagcattgacattctccatagaattagaaaaagctattttaaaattcatatggaaccaaaacaggcatcacactacctgacttcaaattatattacaaggctacagtaaccaaaacagcatggtactggtacaagaatagacacatagaccaatggaacagaacagagacccagaaataagaccacacacctaaaaccatctgatttttttttctttttttgaaatggagtgtcactcagtcacccaggctggagtgcagtggtccaatctcagcttactgcaacctctgcctcccaggttcaagctattctcctgcctcagcctcctgagtacctgggactacaggcacgtgccactatgcccagctaattttttgtatttttaatagagatggggtttcaccatgttagccgggatggtcttgatctcctgacctcatgatccaccccccttggcctcccaaagtgctggaattacagtcatgagccatcacgcccggccaaccatctgatttttaacaaacctgaccaaaacaagcagtaaggaaaggattctctatttaataagtggtgctggaagaactggctagccatatacagaaaattgaaactggaacccttccttacaccatatacaaaaatcaagtcaagatgtattaggcagggcacaatggctgtaatcccagcacttttggaggctgaggcaggtggatcatttgaggtcaggagtttggaaccagcctggccaacatggtaaaaccctgtctctactaagaatataaaaattagctgggtgtagtggcaggtacctgtaatcccagctactcgggaggctaaggcaggagaatcgcttgagcctgggaggtaaaagttgcggtaaaccgagattgcgccactgcactccaatctgggtgacagagtgagaccctgtctcaaaaaaaaaaaaagtatatatatatatatataaaagacttaaatgttaaaccccaaactataaataccctagaagagggccaggcgcaatggctcatgcctgtaatctcagcactttagaaggccaaagcgggcagatcacctgaagtcgggagttctagaccagcctggccaacatggtgaaaccctgtctctactaaaaatacaaaattagctgagcatagtggcatgtacctgtaatctcagctactcaggaagctgaggcaggagaattgcttgaaaccgggaggtgcactcaaggctgggtgacaacagtgaaactccgtctcaaaaacaaacaaaaaaaccctagaagaaaatctaggcaatactgctcaggacataggcataagcaaagatttcatgatgaagacaccaaaggcatttgcaacaaaagcaaaaattgacagatgggatctaattaaagagcttctgcacagcaaaagaaactatcgtcagagtgaacagacaacctacagaacgggagaagattttttgcaatctatccttctgacagaggtctaacatcaagcatctacaaggtacttacacaaacttacaagaaaaaaacaaccccattaaaaagtgggcaaaggacatgaacagacacttctcaaaagaagacatacatgcggccaacaaacatgagaaaaagctcaacatcactgatcattagagaaatgcaaataaaaaccatgatgagataccatctcacaccagtcagaatggctatttttttgtttggttgtatgtttgttttttttgagacagagtttcactgttattgtccaggttggagtgcaatggtgtgatcttggctcactgcaacctctgcctcccgggttcaagtgattcttctgcctcagactcctaagtagctgggattacaggcatgcgccaccacgcccagctaattttgtatttctagtagagatggggtttctccatgttggtcaggctggtctcgaactcccaacctcaggtgatctgcctgcctcagcttcccaaagtgctaggattacagatgtgagccaccgcacccggccgcagaatagctattattaaaaagtcaaaaaataatggatgctggtgaggttgtggaaaaagaggaacacttgtgcactgttgctgggagtataaattagttcaaccattgtggaagacagtgtggtgatttctcaaaaccctagaggcagaaataccatttgactcagcactttcgttcctgggtatatatccaaaggaatataaatcattttgttttgaagatacatgcacgtgtatgttcgttgcagcactattcacaatagcaaagacatggaatcaacccaaatgcccatcaatgatagactggataaagaaaatatggtggctggatggagatactcaacgaaatacccttttccctccaacccacacccctcatgaggcaggggctgatttttgaggacatccttgtggccacttctcacattagaccttccagcccagcccatggacccacatttcagtgccagggagagagaaaaggtccagcattaaaagtgaaagttgtatcctcattaacatctctgagagcacagggagagacatgatgttgacaggaacagtgtgggtggcctggtatcagagtgtagcttaaagggtgagagtgtattctgcccacctgggtaaggaccctgcaggtctgtgacactaggagggctccagaagacagagtgaagctttgatcatcaaagcttctagctcaggagtggcttgaatggggcaggtccaggcctgaggttctggtgacaccaggcaccaacgacttgaaagccacgggagcaacaccgcttgggggaagcaaggaggcatggcctctgcagaagtcctcatcctcagtggtgcgtgatgacaccaggaggggtcctcatgtgtggtggtgagcagcatggcttttggagttagccttcctgggctttatcttggcatcaccacttacttactagtccctaatggtggcttctctgtggggtgttgtgaggatttgctcaggtaatgcaggtgcacgattgaacccagtgtcttgcttgtagttctctttagtgttactgttcttattaaggggctcgacaggatgtgagacctcagcagaagactcctgtgaaggataatggagcagaagggaatgggaaggagcctcagaaataacaggggtctttgcagcagtgggggtggggctgagctaggagaatgttgcctatttctgtgagagtgaatctgtcattttttgtttttgtgtgtgtgtgtgttttgagacaaggtcttgctctgtcgcccaggatggagtacagtggcacgatcttgactcacctgccacctctgcctcctaggatcaagcgatcctcccagcttagcctcccaaatagctgggactacagacgtgcacaccatgcccagataatttttttgtagagaagaggcctcactatatttctgaggctggtcttgaactcctgggctcaagcaatcctcctgcctcatcctcccaaagtgctgggattacaggtttgagacactgcatccagccaaatccattgtttttacccttagggctctgaggcctcaggagacatgagttattcaggccagacagggagtgaagctaggattcacagtggattttcaatacttcactaagaagcttggatttcattcaagaggttgtgaagaacaactgaagagaactgtattaacattaatctgaaggtctgtgcaaagaagtcagaaaaggggaagctcccagaaagagagaccaattaaaagattattaccatagactgagggagaaagcataaggagccgaaataggacagtagcgtcgagaatggaaatgaagggacagatgtgaaggagacacttggcgacagaactatcccaggatatataaagcatctgcttgcccaagtcttcaatgtgtttcagtccagatcctagagctttagaaactatgcaaactagcaccttgccatatgcaatccagcaagctcttagatttttagttgttgtttgcatttactgttttaaacaattacatgatttttcccaactaaaattctaattgctttatcgaacactacattgaataatgattctctagcacaaatatcttagttgattttctattcccagatcattttaaatttgtacattttaaactattttaccatctgctgacccattataaatcaaataatttttttttttgagacgaagtttcactcttgttgcccaagctggagtgcaatggcatgatctcggctcaccgcaacctccgcctcctgggttcaagggattctcctgctttagcctcccgagtagctgggattacaagcatgcaccaccacgccccgctaattttgtatttttagtagagacaaggcttcaccatgttggccaggttggtctcgaactcctgatctcaggtgatccacctgcctcagcctcccaaagtgctgggattacagtcatgtgccaccgcgccaacctcaaataaataactaataaagtatataataaatggcaaatatgatacttaacaaaatgtcatgctttctgtactgttgctaacaatgtccatttctcacatcagtgctttattttcctttcatattgatttaaaatacttattctcaccaggtgcagtggctcacacctgtaatcccagcactttgagaggctgaagtgggaggactgacctcaggatttcaagaccagcctgggaaacatagagagacttcgtctgtactaaaaattttttaaaattagccaagcatggtggtgtgtgcctatagtctctgctacatgggaggccaagacaagaggattgactgcgtctgggaagttgaggctacagtgagccatgatcacgccactgtgctccagcatgggcaacagagcaagaccttgtctcaaaaaagaaaaaaaaaaaagagtatcctctatatgaaaagaagaaaaggaaaattaaaaaaaaagaacaggagaaaaagaaatatgacaaataaatctattaacaaattataaccagatcactaagatttaagacaaatatactaacattaatgacttgttaatgccattacttgccactgtgttcctgatttaagaatttggggcctggcgcagtgactcactcctgtaatcccagcactttgggaggctgaggcgggcggatcacctgaggtcaggagttcgagaccagcctgaccaacatggagaaaccccgtcttcactaaaaatacaaaattagctgggcatggtggcgcatgcctgtaatcccagctacttaggtggctgaggcgggagaatcccttgaacccgggaggtggaggctgcggtgagctgagatcgcaccactgcactccagcctgggcaacaagagcgaaactctgtctcgaaaaaaaaaaaaaaagaatttggatagtaaactgagaactaagaattaggaacacttaaaaaaggaagtagaaatgtgcaaacctgggtgatttgttcagttttccaggaatgaaattatttaatactattacgtgatattatgcttgctttttcctcaacaattaactgaggctaatgacacctacctcccaatgttattgtgaggattaaacaaagtaacttctgcttttctttttgagacggagtttcactctcgttgcccaggctggagtataatggcatagtctcagctcactgcaacctccacctcccaggttcaagcgattctcctgcctcagcctcccgagtagctgggattacaggtgcctgccaccaggcccggctaattttttgtatttttagtagagacggggtttcaccatgttggccaggctggtctcaaactcccggcctcaggtgatccacccgcctcggactcccaaagtgctgggattacaggcatgaggcaccatgcccggccaaacaaagtaacttctgttaaactacgaagtgtgatacatatgtaaaatgttacctttttcttttttttctttctttttttgagagagggtcttgctctgtcacccaggctggagtgcagtggggcaaacagctcactcaccacagcctcgacttcttgggttcatgtgatcttcctgcctcagcctcctagtagctgggaccacaggtgcacgccaccatgactggccaattattattattattttgtagatacaaggtctcactgtgttgcccagcctagttttgaactcctgggctcaaacaatcctctcgccttggcctcccaaagtgctaagattgcaggcgtgagccaccacacctggcctaatttttctaaaatactgaaatttagagtatgtttagttagcattcatgaagaaagttaatccataaatggaatggatttgaattgaacattcttaggtaatttgttaaccagacacatttgtcagccatcttgactggtccgtggagataacatacactgtggacagatgacaggtgacccacgagtacttccccactagcattagcagcctggcagcacaagacagcttatttctcaacaagccctttctctggagccataaaatagcatcatcaatttttttttttttttttttttttagacagagtttcgctcttattgcccaggctggaatacaatggcacgatctcagctcaccgcaacctctgcctcctgggttcaagcaattctcctgcctcagcctcccaagtagctgggattacaggcatgtgccaccacacccggctaattttgtatttttagtagagacggggtttctccatgttggtcaggctggtcttgaactccctacctcatgtgatccacccaccttggcctctcgaagtgctgggattagaggtatgacccaccatgcccaatcgcattatcaatttcttaagctaaaaagagacttgtattaatttattaaatcaagtcgttatcaaatgcctgttttaaacaggtaaactgaatgttatggtggtttgaagctgggcaacccacttccagtctcttatcatcagtacaagagcagaatttggggcctgacagaccttaatttgaatcctggctgtggtcgggcacagtggctcatgcctataatcctagcactttctgagcctgaggtgggaggatcccttgagcccaggaaactgaagcttcagtgagctgggatcaagccactgcactccagcctggatgacagagcaagatcccatctcttaaaaatttataagtaaacaaaaaattaaaagatcctgactgccacagagagagaaagggaggctctacatacatacaactgttcctgttatcttttgctgtacaataatccaccccaaaatttagtgacttaaaatgacaatttattataatttctactaattctgtgggttgatttgctcagctgggcaattcttccttttttttttttttttttttgtgacagtctgtctttgtcgcccaggctggagtgtggtagtgtgatcccggctcaccgcagcctccacctcccaggttcaagcgagtctcctgcctccagcctcccgagtagctgggaaccacaggcacatgccaccatgcccagctaatttttgtatttttagtagatacaggggtttcaccatgttgaccaggctggtcttgaactcctgacatcaagtgatcttcccgcctccgcctcccaaagtgctgggattacaggcacgagccaccgtacctggccaattctctcttagattctttcacgtaactgcaacatgatggtggttggaaaaagagtcatccgaagctcaactagaatgcacgaccgagatggcttcttcatttatgtcgtcttgtgttttagtatatggaatagctacaaactagccaggaaacaatatctgtcactctccatgcagcctctctacaggactcacctgggcttcctcatgctatgatgccttcgtgatacttggacctctgacacagggggccgcattcccccagaacacccatttcaagagcaagtattccaagaggttgaaaacacaagctgtcagtccttctaaagtctggaactgtcacagggttacttttgctgcattctattgggtaagcagatacagggccacacagattcaaagggaggggaaataaactccatgaggagaatgataaagatttttgcagccattttaaattcattacaatgactatgaaacatttcctagatatattaagtggaaaaaaaaaaggaggttaaagaatgtatgtttagctgagcacggtggctcatgcctgtaatcctagcactttgggaggctgaggcaggcgaatcgcttgaggtcaggagttcaagaccagcctggccaatatggtgaaaccccatctctactgaagatacaaaaattagccagcagtggctcacacctctaatcccagcactttgggaggccaaagtgggtggatcacctgaggtcagaagttcaagaccagcctggccaacatggtgaagccccatctcaactaaaaatacaaaaattagccaggcatgatggtaggcatctgtaatcccagctacttgggaggctgaggcaggagaatcgcttgaaccagggagttggagattgtagtgagccgagattgcgccattgcactccagcctgggcaacaagagcaaaactccatctcaaaaaaagaaaaaaaaaagctgggcatgatggtgcacgcttatgattccagctactggggaggctgaggtgggggtatcgcttgaacccaggaggaggaggctgcagtgagctgagattgtaccactgcactccagcctgggcaacagagtgatactccatctccaaaaaaaaaaaattgtatttagtatggtatatttgatttaaaaaaaaaaggagagtttttttgtttttgtttttgtttttttttttttaagagacagagtctcactttgttgcccaggctggagtgcagtggtacaatctcagctcactgcagccttgaactcctgggctcaaataatcttcccacttcagtccctccagtatctgggactgcaggcacaagccaccacacccatctaatttttaaaaaatttcttgtagagacagggtctcactagttgcctaggctggtcttgaactcctcgcctcaagtgatcctctcacctcaagtgatcctcccgcctcagcctcccaaagagctaggattacaagagtgaaccgccacaccaggccaaaggagactattttatttacttaatttattttattattactatttttttttcttgagacagagtcttgctctgtcgccaggctggagtggagtggcgcgatcttggctcactgcaacctccgcctcccaggttcaagtgattctcctgcctcagcttcctgagtagctgggactacaggtgcgtgccaccatgcccagctgatttttttgtatttaatagagacggggttttcaccatgttggccaggaaggtctcgatctcctgacctcgtgatccacctgcctcggcctcccaaagtgctgggattacaggcatgagccaccacgcccggccaagactatcttaaaatgtgttagtatatgctcagataatatcagcaatgatacatgtgaacctggtaagtgtttttaggaaggggaattagatgactgggtgacaaagatgggaggtggaaacttcctattgtatactcttttttatatgtctttaactttatatcatgtgcatatattacctattcaaattcgacatcaatttttatagagacataacatttgccacaatttatgtcacaagtgaaataaatattgcttgtggtggataatctgacaatacttaacatagtcaattaaagaaatatcagtttgttaccaactttgtagcttcttgatcttcagtgtgaaaagcctgtataaaagatcactctgttaaaatggaaccagtggtcagagcagctacaattgcataatagaacataaaacacaaataccagctcttcagggaggaaccatagggctaatttccacattctttacatttcttcgttagcataacagacaaatatttgaacaattcttgctctaacagggcacatgatttttcattagaaatggttgcaaaatggctaggtgcggtggctcacgcctgtaatcccagcactttgggaggccgaggtgagtggatcacaaggtcaggagttagagaccagcctggccaatatggtgaaatcctgtctctactaaaaatacaaaaattagccatacatggtggcaggcacctgtagtcccagctactcgaaaggctgaggcaggagaattgcttgaacccgggaggcggaggttgcagtgagctgagatcgcgccactgcactgcagcctgggcaacagagcaagactctgtctcaaaaaaaaaaaaaaaaaaaggaaagaaagaaatgattgcaaaacttcgtgtttaactattaaatcagatttgattgagtaagaggaaagataggaagagagagggaagaagaaacttctgtttctatctgtgaagtattttaataaaaatactagagctacaaaactagatgttttacttggtgtgactgaatggtttcttaactttgagcaacagtaagtctcatctgcaaattattggcatctcagctagtattactaatttgggacacatttaaaaaacaagttttaagagtcattttccagaaattgtcatataactgcaacagaacagtaatgagactgaacttattaccaaaaaatgctcattttcaacaactgtactttgggcctatctgatagtcttcctgttaatgaggaatagtttagtttttgggttttttttttttttttttttcaaataaatcaagggattgaattctttgtaactttttctttttctgaaatgcaatacaaatgttcttaaaatacaggattgccaagattgatactggcttttgaaaggatactaataacattttagttgctaagatttctttttatatatagaaaatactcctgctattcttaagaagtattttaaagatccaaagacagaattttgattgtagcttttatacaatgttgccattattttccatgattctattgccaaaaaggaaggtatagcatatgagtactataagcagcctgtgaatatctttgcttgcaacagaatttagaagaaatgataaatgtgtgccacttaaagggtattgtgagaaaactgcaatgttttaaggcaaaatgggtccactgaagtaagaaagcttcaagttaaatgggaaaataaatcatgatagcctctcttaatttgccatgattcagtatgggtgaggagaagttaaatgtagtagacatatgttgtgtttttctggctgtccaccatcctccccttcccccttcctatcagcagctcaatcttcccttggaaggaatttcctgttgtatgttttgttaatgcatgggctatccctggaacacacctcccaatgctcatgcccagtacagaagcagagggctaggtccttcctccagctgccctttggtgcccctggggaggagacacatgacccaatttgagcaataaagtgctccctaccaggattttgcatcttgagcgagtgaaccagaccggggccatctgggagtcagattgctcccagcggcaggagcgtggtactgaggctgggcatctctgctgcctcacctccatggtgcccctgtatccaactgtattcaaagccctctagccttctgtcatgttggtgagtctctgatgcctacctgtgttattgagatatgggttctgttgcatgtaacagaaaccaaaaataatggatacttaaggcacaagtttatttctctttcacataaaagtttgaacataggcattttaggaactctggttgatctggaacccagaatactctgtctgctttgccatccccaaggtatggacttcctcatggtccaagatggagctacagccatcacataagtaatgggaaaaaggaagaagtatataccttcacccttcaaggataagtttaggctgggtgcagtggctgtcacctataatctcagcactttgggaagccgaggtaggcggattacttgggctcaggagttcaagagcaacctgggcaacatggtgaaaccccatctctactaaaaatacaaaaattagccaggtgtggtggcacacacctgtaatcccagctacttggaaggctaaggcaggagaatcactgaaacccgggaggcagaggttgcagtgagccaagatcacaccacagcactccagcctgggcaacagaatgagactctatctcaaaaaagaaaaagaaaaaaaaaaaagccaggcatgatggcacacacttgtagtcccagctgcttaggaggctgaggtgtgaggattgcttgagatccagggtggggcagaggttgcagtcagctgagactgtgcctctgcactccagcctggatgatggagtgagaccctgtctcaaaaaaaaaaaaaaaaaaggataagtgtaggaagttgcacacattacttctgtttatataccactggccagaacttagtcacatggctagacctagctgcaagggaggctggggaaagtggtattatgtgccaagggttcttactggaagctttctactctttcctgagtaaaaaggaaagaatagaaattaaataacaactagcactctctcacagacctttcataaatacttcttaagacagccagagatggcttctgttacttccaaccaagaatcatgtcccaccacccaacagtctcgtgtctattgttcccatttatttatttatttatttatttatttatttaatgtatttatttatttgagacagagtctctctcttcatccaggctggagtgcagtggtgcgatctcggctcactgcaacctccatctccctggttcaagcgattctcgtacctcagcctcctgagtagttggggctacaggcacacatcaccacccctggctaatttttgtatttttagtagagacggggtttcaccatgttggccaggctggtcttgaactcctgacctaatgtgatctgaccacctcagcctcccaaagtgttgggatgacaggtaagagccaccacccggcctattgttcccatctttatgtccatgtgtatctgatgtttagcttccacttacaagtgagagcatgtggtatttggttttttgctcctgccttgattctcttaggatgatgacctccagctgcatccatgctgctggaaaggacatgatttcattcttttttatggctgtgtagtagtgaatggagtatacgtaccacatgttctttatctaatccatcacagttgggcacctaggttgatcccatgtctttgatattgtgaatagtgctgcactgaacataggagcacatgtgtctttttggtggaatgatttattttcctttaggtatgtatctagcaatggtattgctgagtcaaatggtagccctgttttaagttctttgagaaatcttcaaactgctttccacagaggttgaactaatttacattcccaccaacagtgtataagcattcccttttctccacagccttgccagcaccttttttttttttttttttttttttgagactgagtctcactctgtcacccaggctgaagtgcagtggtgcaatctcagctcactgcaacctctgccaccccagttcaagcaattctcctgcctcagcctcccgagtaactgggactacaggtgcaagccaccatgcctggctaatattttgtattttagtagagatggcatttcaccgtgttgtccaggctggtctcaaactgctgaactcaggcaatctgaccaccccggcctcccaaagtgctgggattacaggtgtgagcaaccgcatcctgcctgccagcatttattattttttgactttttagtaatagccattctgggataagcatggtggctcatgcctgtaatcccagcactttgggaggccgaggtgggtggatggcttgagctcaggggttcaagaccagcctgggcaacatggcaagaccccatctctaaaaaatacaaaaattaggcgggcatggtatcacatgcctgcaagtcccagctacgagcagctgacacaggaggatcgctggagcccaggaggtcgaggttgcagtgagccatgttcacaccaccatactccaccctgtgtgacaaagcaagaccctgtctcaaaaaaaaaaaattaataataataataatagccattctgactggtatgagatggtatctcattgtgcttttcctttgtttctttaaagattagtgatgttgaacattttttcgtatgtttgttggctgctacatttcaacattctttagtaatttaattcaacataagtcatctatatgagctgaaattactataccatcgtatagtcagaggttatagataaatgcatgaagatcatttttgccttgtcaaaatactgtgccacatacagttatcaataaagtgagtgatgtaatagtaaatcattatactctcatgacataaaagaaagaaaataaagttaatatgtacaaataatattaatgctgactatgtaatgaagccatgttttcttatcaggatgttcatgaataaaatgaaatgacagcacaaggacatttattacataattttctacagtagaataaattcctatatgtaacagaaagtcagatgaaattaaattaaactgaaaggaaaatacttgaattagaccaaataaagaagtttctgatgaaaaattattacaggaattgattactgagcttgttacagactccctggaatggacaattacctgtctaggataacttaattatggttctgcctagaggcatgaggctgagttgacgacttctgcactaggattttatagttttattgaaaaaaatataaaacctgcacagtttttaatttaaactttttttttttttttttgagatggaagtatgctcttgtctcccaggctggagtgcaatggcacaatcttggctcactgcaacctctgcctcccaggctgaagcaattttcctgcctcagcctcctgagtagctggtattacaggtgcccaccaccttgcttggctaatttttgtatttttagtagagacagcgtttcaccatgttgcccaggctggtcttgaacttctgacctcaggtgatccacctgcctcggcctcccaaagtgctgggattacaggcatgagccaccgcgcctggcctaaatttaaacttatgaggcatatagtggaatacactcatttggagatcaaactattggctgggcaacagtttgaacaatagttctcaacatctagtactttccttcacttaaaggaataccacactgaattaccgtgatattatacattataatttaggttgctcttttatatggaaatatgaaattactaatctacaaatatagcctttccaataaagctacaggatgtgtggagtaaaatcagaattctccattattcattacacttatatgatgcaggcaagtgggcaatcatttacaagtcagtttcagataaaaaacatcatttaatcattacattgctatcaaccttgaaaatatcaaagagtcaaagaggttaaggaagaaaaaacaatttgtcctatttatatacattaaaatgctagcaaaaatgggtctgtttaaaaatcataaataatatatatatatatatatatatacagtaaatagagagaatacagtataccaaaaaccattcacaatttttcagctaagaaatagcagtgtggtacatttcttcacagtcttttttttttttttgtatttatttattttgagacagagtctcgctctgttgtccagactggagtgcagtggcgcgatcttggcttactgcaacctccacctcttgcattcaagtgattcttctgtctcagcctcctgagtagctgggattacaggtgcccaccaccacacccagctaatttttgtattttattttattttatttttcgagatggagtttcgctcttgttgcccaggctgaagtgcaatggagcgatctcggctcatcgcaacctccgcctcccgcgttcaagcaattctcctgcctcagcctcccaagtagctgggattacaggcatgcaccaccatgcccggctaattttttgtatttttagtagagacggggtttcaccacgttggccaggctggtctcaaactcctgacctcaggtgatccacccgcctcggcctcccaaagtgctgggattacagatgtgagccaccacacctaacctcttcccagtattttatattcatcatatatattttaaataaatattgcacattttcttctttaaagtatttctttttacttaatttcagacttatagaaaagttgtgaaaatggtacaaaggactcctctctaaccctcatccagattttccagatgtgaacattcaatcacacttgctttctctcgtctccctctttctgaaccttttcagagtaactcagagatatgatgcccctttacacctcaatccttcactgtgtatttcctaaaaacaaggaattctgttgcagtcaccacagtacaatgatcaaaatcaggaaattaatattgatacaaacctattatctaatcttgttcatggttcaccatttctcccaacaatgccctttgtaaaaaaaagaaaatcccgtatcatattttgtgtttggttatgtctttttaattttcagtctttcttgcggtgtcttcatgttgacattttggaagaataaagaccagttattttgtagaatgtcccttaatttggagttgcctgatgtttcctcaagattagggtcaagttatatgcttttctggcaaaaacaccacagaagtgatgtcatgttctacttaatgtgtcctgttaggaggcacattatgtccatttgtcccattcctggtgatgtcaactttgagcatggatcctacattttcattcacaatagtaacagaaaaattccttatctctttcaaaatttttagaaacatcattccagtgtctacaaaatattttatttatggatgtgtcataattttataactgatcatatttatgttatcattgcattggttaagaaccaatgcatgtatcatatcatatcacaatgaagttaaaaattttattgcacacctgattttaataaaaatatttttagtgtttttgttttttttttgagatggagtcttgctctgtggcccagactggagtgcaatggtatgatctctgctcactgcaatctctgcctctgggtttaagtgattctcctgcctcagcctcccgagtagctgggattacatgtgcctgccaccacacccagctaatttttgtatttttaatagagaccgggtttcaccatgttgaccaggctggtcttgaactcctgacctcaggtgatccatctgcctcagcctcccaaatttctgggattagaggcatgagccaccgcacccagccaatctgcctttttttatggctgcatggtattccaagatatatatgtaccacatattctttatgcagtctattagtgatgggcatttaggttgattccatatctttgctattgtgaatagtgctgcaatgaacatatgcatgcatgtgtctttataacggaatgatttatatttttggggggtatacacctaataataggattgctgagtcaaatagtatttctgtttttaggtctttgaggaatcatcacactgtcttccagcaatggttgatctaatttacactcctacgcgtattattattattattttttagacaggtctcactcagttgcccaggctgcagtacagtggcatgatcttggttcactgcagccaaaacctcctggctcaagtgatcctcctgtctcagcctcccaaagtgctgggattacaggtgtgagccaccatgcctggcacctttcttccttccttccccgcttcctcccttcctccctctctctctctttctctctctttttctctctttctctctctctctgtcgctctctcccttccttccctccctccctccttccttccttccttccttcctctttctctatttcttttggagatggagtctcaccctgtaccctgtctagagtgcagtggtgcgatctcggctcactgcaacctccacttcccaggctcaagcaacactcctgcctcagcctcttgagtagctaggactacaggcgtgtgccaccacgcccagctaatttttggaattttagtagagacggcatttcaccatgttggccaggctggtctcgaactcctggtctcaggtgatctgcctgcctcgacctcccaaagtgctgggattacaggtgtgagccatgggtgcctggctccacatatttgctttcttgagtgagtgacaaaggattagatccagaacacactgcaggattatacctatcctaagtacaaacttacataaaaatcattctttatgtatattgtagcaggaaaaaaaagtcaaaaactactgttgcagagacaggacatagaaatagacctgataattaaataagagtggggatcataaatattgtcttaagccttttgggaacaactagataagcaaatgtagccagtcagaatagtggacatttgtaatttgcctctaaagcatttattattccttttctgagccacaccaagggttactgcatacagctgcacaggttgtgcaccgcacaattccaagggatgccaatcacattgcagactatgtgaatggtgaccctggagttgtgcagtgcacagtctgtaccacattcccagtgatctggtcacagccctgattttcctttgggatccactgctcaccctctcacagtcaacacaatctgataggatactaccactggacctagagttataacacgtaactaggtctaatgcatcccatccctctggcctctgggtcaatggtggtcacatgaactaaacctaaactaatccactcagttgaatcacagaactcttaatgtgattgtacagccttatgacataattttccaaataaagactgattttttttttacactaacagtacctaatgaagacagcaactgtattagtccattttcacactgctataaagaaatatccaagactgggtaatctataaaggaaagaggtttaattgacccacagttctgcatggccggggaggcctcaggaaacttgcaatcatggcagaagggaaagcaggcacatcttacatagcaggagagaggaagtgaagggcgaagagtcccttataaaaccatcagttcttgggagaactcactcactatcacgagaacagcatggggaaaccacccccatgatccaatcacctcccaccaggtccttccctcaacacctggggattacaattcaagatgagatttgggttgggacacagagccaaaccatatcagcaactatcaattaagtgtgtcaacatgaagaacttatgtttttctccaagcactgatgatggcatctttaccaacttagccactctcttatctggtctctggtgctcagttgatgccattgagatggagctgcaatgagtctagtaaatatattcttagaaaaatgtttttctctgaccaaaacagagactgaactacaagaatcaccataatctctaagtaatcagccaaggctagaacagaataggccatgatgtattgggaggtggtgcattcccatcactgcaggtgatcaaactcagactgggcaatcactcataaaacacatagtcaaggagatacaaatgtccactgggggcttaaactattatattgccaagatgatgcctgcaatgtgggcttttaaaatggtaaagatattcaaacgtatgcatataaacagaaacatgatattctaagaattaaatagactgtgttatatagatttgcctccaacatttttggaagcacaagagtgtgacgatgctttcccttgcagggaaactcaattgtgatgccagtatgtcaagattatcaaccagattccagggtggttttcttcacaattttgttgagcttgtctatttcttcgtgcattatattatttttatgtcactaatttaaaattttaagaagacttttcccatatattttccctatatagccatcgaaaaagcacacacataacacagtgactaatttttgttgtcacttatgtctttcacttcaccaatttgtttacagatttatggttcattgactttcacagttggaaaattaatgctaacccaatactttgtataaatttattatgattttactgtaaattattttgcagtagattgcttgactgacgtggtgtaaaactctatagtatataaatgaaaacattaagcaagttgaaggcacaaaatcagctagcaccctaatatagtagcttttgagtgtgaaactttattttttaatggcacagatatcgttaagtgtacagctcaatgaattttcacaaactgaacatatccatataattctcagccagatcaagacacagagtgtcactagctccccaaaagcccccctcatatttgctcttagtcactagccacacccgctaagtccatatcctgacttctaattgataggttagttttgcctgcggtaaactttatgtaaatgggatagtacattaggacctttgtgaatgacttctccccctcaatttaggtttgtgaaatgtagccatgcttttgcatgttgtttgttccttctcgttgttgtatactattccattgcttgatgtaccacaatttatttatccatgctactgttaattgagcatttagttacttggttagattttgactattacaaaaagtgctgctggccgggcgtggtggctcacacctgtaatcccaacactttgggaggtcgaggcaggtggatcacttgaggtggaaagttcaagaccagcctgcccaacatggagaaatcctgtctctactaaaaatacaaaaatttgccaggcatggtggcacacaactataatcgcaaatactggggaggctgaggcaggagaatcacttgaacccaggaggcagaggttgcagtgagccaagatcttgccactgcactccagcctgggcgacagagcaagactccgtctcaaaaaaaaaaaaaaatagtgctaccatgaacattctagaacatgccttttactgaatataagtatgcatttatgttgggcatataccaaagtactattttaatcctccagcggtagggttaaaatgtctacctgctatctaatgtgtgctcagcctcatgaacaatgatatattttttctagtcatgatgttaagaaggcagcttacagtttttctggtacaagaaatacatgacatttcaaaacatcctagtaaaacatttggaatgtatttagatcttcatatacttaaagccttaactcaggagtgtaaacgattaacttttatttttatatccccacacttaatttctattttgagcccccattctgcccaatggcagaagaaacaatctgagtgaatgaagaatgcctactcctgcctttcctcgctgcacctaagttccagaggccaaagtgatgctggggctgctagttgccatttatctgggccaccatgtgctgagaccccaccgttcccctgtggggcctgctggctcctggggagtctttccggtcctggctgcagggcctcttcagatctgctggtccctttgccggggcagggtgggcaggcagcctctgcgccctctctcaggagtgtggcctgcacgctgcatgtccacactcgtgtactgtgtattctcttcctctgtgcccatgtcttgctgtgtccagagataccccttggtccagattggagtgggtagcctggatctccatctgttcctccaaatcactgttgatggcacgaactttataccatgaatcttctaggccttgggagtgtgaaactcagaagcccaggttggttcttataacacaaaagcttttcacctctatcatgctttccttgaagcagtgaatgctgatggctgcagaggaatggaggtgtagacggaagagaatattgttccactacttaaatatacctttttcttttttttttttaacatggagtcttgctctgtctcccaggctgggtgcagtggcttgatcttggctcacggcaacctccagctcctgggttcaagtgattctcctgcctcagcctcccgagtagctgggattacaggtgccagccaccatgccccactaatttttttttgtattttcagtagagatggggttttgcaattttggccaatctggtctcaaactcctaacctcaggtgatcggcccacctcagcctcctgaagtgctgggattacaggactgacccaccgcacctggccccttcattctgttacttctttgaactccattcataattgcttaattaatttttgttttttttgagacagggtttcactctgccactcaggctgaagtacagtagtgtgatcttggttcactgcaacttctgcctcccaggctcaagccatcctcccaccttagcctcccaagtagctgggactataggtgtgcaccctcacacctaatttttgtatttttgtattttctgtagagatgggataatttttgtattttctgtagagatgggatttcaccatgttgcccaggctggtcttgaactcttgagctcaagtgatccgctcgccttggccccccaaagtgctgggattacaggagtgagccactgcgcccggccataacccttaatttaaaaaacaaacaaacaaaaccttttcacaatactacttcaagtttgctatgatagcaacttgatttatattagattgaattcagtgtaggctttggcaaaattcacagctctttgttatttctaaaatagtttcaaaattctagataaaaattcaataataacaaactattattagtttccatgtattaagcacacagtttatgccaggtgcattgctatcaaccctatatatattttcttatttaatgtttacagcaacccagtgaaggaaggcattagctccttggtttttttgtttgtttttgagacggagtctcactctgtcgcccaggctagatgcagcggcatggtctcggctcactgcaacctccacctcctgagttcaagtgattctcctgcctcagcttcccaagtagctgggattacaggtgtctgccaccacacccggataattttttgtacttttagtagagacagggtttcaccatgttgacccagctggtcttgaactcctgaactcaggtgatccacccacctcagcctcccaaagtgttgggattacaggtgtgagccatggtgcctggcctatctcctcattttatatatgagaaaactgaggcacaaataggtgaactggcttgcttgaggtcacagaactatgctgtgaacccatgcagccaagaacttgccgtgaacctagagtcaatgcaaataaccaccatgttacaggacctcaatgcagagaaagaacaggatctggcaactttgttattactttctcctttaaaacattaaaatccaggaagaagtgccctttcagacaagaaaaactgatagctccttcctactgctttctgaatcttggttcccacaaattaaataaactagtctctactgtgtaaatagcagagtgaactgatggaattatttgttacaatttctaaggtcaatttgcaacatataaacttatatacaagcaggcagtcattgaaaatgtttgcagaaggcttatgaactaaagttgataaaaagtattaaacaatatgtggacacacacacatacatccaccctacagagcagacaatcccaagtgctacagtgcttgcgcaaatatctttaatgaaacttaagttaatgccttccaaaataaaagcagctgcttgtttcaatattatcagtgcgaaagctgtgatctaaaggcatccggtggaataaaaagtcatttttatttcactactttaatccctagtcctgaaataagggaacaagccccacagtattacatttcacttcctagtaactaaaggaatgtatactcataacgaaacttcctaaccttacggaaagacacaatagggaaaaggaaaagttccccagaaaattttctctccagagattatcattatcaatgatttttatttcttcagatttttttctattcatatatgaggtcagtctctatctgcaggtatagcttttataaaacacaattaacaactccaaaagccttagagagcaatggagaacttcattacagctttgagaaaatgaataactgaaaattgcatgcatgtcgcaataaaacttccaaaatgtccacgttagccattttccctccatctcacaaaactgccctttctcccttcctccaaactcatagctaccttgtctcaaacctacttcctcttatttcttttccttttatgttttcctattcaaaagtaaagcagtctataggcattttcagttttcagcctaagtgaccccatggttgaacaatttgtcaagtaaatgaagaatgcttcccccttagaaaggtcccccaagggaggacagaaacagcaacagaaaacactcataatttaatgtttttgtccttttcacacatatgtagctatatctattatattatattttattttatttttgagacagagtttcgctctgtcacccaggctggagtgcaatggtgcagtctcagctcactgtgacctccgcctcccaggttcaagcaattcttctgcctcagcctcccgagtagctgggattacagatgtgcaccaccatgcctagctaatttttgtatttttagtacagacgaggtttcaccatgttggctaggctggtcttgaactcctgacctcaggtgatccacctgccccagcctcccaaagtgccgggattacagcacttttacagcatgagctgccatgcccagcctattttattttattttgttttattttatttagagacagtcttgctctgtccccaaggctggagtgcagtggcgtgatcatagctcacttggctaatttttaaactttttgtagatatggggtctgggtatgttgcccagcctgatcttgaactcctaggcttaagtgatcctcctgccctgacctcccaaagtgctgggattacaggcgtgagccatcctgcccagcctgtatctattatataagctggtttttttgattactttaatgcaaatgagattataccatactctgctctctgtcacttcctattttcatgtaatttatgttagacatctgtcgatgtcagtataaatacatctagatcattttttatagttgtatacctttcattacatggatgtttcacaatttacttagctaactacctattgttggacatttggttatttccaaatttttgctattttatataatgctgcacttacataaaatatagttttatataattatgtttaattatgtactactactgtgtctgacaactgacttgtatcaagaacatacaaagaattgttacaagttgccaggcagagtggctcatgtctgcaatcccagggctttgggaggccaaggtgggcggatctcttgagcccaggagttggagaacagcccgggcaacatgggcagaccccgtctcgacaaaaatacaaaaattagccaggcataggggcacacatctgtagttccagctacttagaggctgaggtgggaagactgcttgagcccaggaagttgaggctgcagtgagccaagatcacaccacggcactccagccagcacgtcaaaggccctgtctcaaaaaaaggaagaagcgggggaggcaaataagtagagtgtaagccacctcatccaaccttattggaaccagtagttgactggttaatcagtccaagcaaggaagcataaaaactgatgcatgtgccgggcatggtggctcacgcctgcaatccccgcactttgtgagacagaggcgggccgatcacctgaggttaggagttcgagaccagcctggccaacatggtgaaaccctgtctctactaaaaatacaaaagttagccatgcatggtagtacacgtctgtaatcccagctactcaggaggctgaggcaaaaaaagaagaagaaatgctatgtgaagcctttttataagcgcattaatttcattcacgagggcagagccctcatgacctaatcaccaccttgaaggcctcacttcttaacatcatcacattaggtcttagattataacatgaattttggaggactcaagaaaaaaaaagtgaaagacaacccacagaatgggagaaaatacttgcaaattatatacaaagtaggcccactttatttgtggaaaatatgtagccagacacagtggctcatgcctgtaatcccagaactttggaaagctgaggtgggaggatcacttgagcccaggagctcaagactaacctgggcaacatggggataccctatctctacaataaataaataaaattactcagatgtggtgatatgtgcctgtggtcccagctacttgggaggttgaggtgggagaatcacgtgagctcaggaggttgaggctgcagtgagccaagataacattaatgtatcccagcctgggcgatagaccgagaccttatctcaaaaaaaaaaaaaatctatctatctatctatctatctatctatctatctatctattcatatatagatatagattaatatagatatataaacatatatttatagatatatagatacataaatatatagctatatataagtatatatttataaatatatagatatatatgtaacaaaatatgttccaagacctccagtgtatacctgaaactgcagatagtaccaaactctatatgtactatgtttttttcctatacatacatacatacctatgatgaagtttaatttataaattaggcactgtaatagaataacaacaataactaataataaaagagaacaattagaatatactttttgtttttgagatggagtcttgctctgtcgcccaggctggagtgccatggcaccatctcggctcaatgcaacttccgcctcccaggttcaagcgattctcctgcctcagcctcccaagtagctgggcctacaggcgcctgccaccacgcccggctaatttttgtatctttagtagagacagggtttcaccatattggccaggctggtctccaattcctgaccttgtgatccacccacctcggccttccaaagtgctgggattacaggtgtgagccactgtgcccggctagaatatactttaatataagttacatgaatagttgtctctctctcaaaatactgtaatatttgggattgcagctgcccgcaggtaactgaaactgcagaaagcatacgggggactacagtatctgacaatggacttggatctagaatacataaagaactcttacaacttgataataaaaaggatataacccaattttaaaatggacaaaagatctgaacagatatttctccaaagaagatatacaaatggtctataagggccaggtgctgtggcttatgcctataatcccaacactttgggaggccaaggcaggtggatcacttgaggccaggagttcaagaccagtctggccaacatggcgaaaacccatctctactaaaaatataaaaatcagccaggtgtcgtggcgcatgcttgtagtcccaggtactcaggcagatgaggcacaagaatcactcgaacccgggaggcagaggttgcaatgagctaagattgcaccactgcactccagcctgggcaacagagcaaaaccccacctaaaaataaataaataaataaataaaaataaaagaaagaaaataaatggccaataagcaccagaaaatacactcaatttctgtcttagtctgtttgtgctgctataacaaaatacctgagactgagtaatttataagcaaaaaaaattattcctcacagttccggaggctgggaaatccaaaatcaaggtgatagcacatttggcatttggtgagggcctgttccattgttcccgttcttgcagtggcatcttcacacggcaggagaagaaaggaaaaaagaagaagaaatgttatgtgaagactttttataagggcattaatttcattcacgagggcagaacactcatgacctaatcaccaccttgaaggcctcacttcttaacatcgtcacattaggtcttaggttataacatgaattttggaggacacaaacattcaaaccatagaaacatcattagccatcagggaagtgcaaatccaaaccatgttaagataccacttcacactcacaagaatggctataataaacagacagataataacaagtgttggagaaaatgtggaaaaattgaaacactcatatgttgctggagggaatgcaaaatgctttgcaatgaagttggaactgctttggaaatagtctggcagttcctccaaagcttaaacacagagttatcatatgacctggcaatgccaggcttcatcatattcccaagggaaatgaaaacatatgtccacacaaaaaattatacatgaatgttcatagcagcattattcataatagtcaaaaagtggagacagctgggtgtggtggctcccaacactttgggaggccaaggcgggaggatcgcttgaggtcaggagttcgagaccagcctggccaacatagtgaaatccgatctctactgaaaatacaaaaatcagcgggacatggtatacgtgcctgtaatcccagctacttgggaggctgaggcaggtgaatggcttgaatccaggaggcggaggctgcagtgagccaagatcacaccaccgtactccagcctgagtgacagactgagacgccatctcaaaaaaaaaaaaagtgataaacagataaatgaaatgtgttatattcctacaacggagtattattgagccataaaaaaaaaggaaataagtactgacacatgctataacatgaatgaaccttcaaaacattaggttacttgaaaaaagccagtcacaaaagatcacaaattgtatggttccatttatatgaaatgtccaaataggcaaatcccatcctaaaagaaagtaaattagtggttgcctaggactgagggatggaggaaatggggagtgactgctcataggtatggtatttttttgggggagaaatgaaaacattctaaaattgattgtggtggccaggcacaggggctcacgcctgtaatcccagcactttgagaggccgaggcgggcggatcacctgaggtcgggagttcgagactagcctgaccaacatggagaaaccccgtctctactaaaaatacaaaattagccgggcatggtggtgcatacctgtaatcccaccgggaggctgaggcaggagaatcgcttgaaccagggaggtggaggttgcagtgagctgagatcgtgccactgcactccagtctggcgagagagtgagactccatctcataaaaaaaaagaaaaaaaagaatgtttcaggcaaagggaagagaagtgcaatggtgctatttcaggcagaagcttgtcaggtttgctgtggtgtggctaatgtggaaggactcagtgggaaggaaaagagatgagggcacagtagtgggcagggccaagataaaataaagccatatgcacactgttacattttttccttgtccaatatatttcattaaatgtagacaaaacttattataaagacataacttttgatgtttgtaaggtcatctgttatttgcactccttttttttttttttttttgagatagggtctcactctgtcacccaggctggagtgcagtgttgccaccacagctcacagcagcctcgacctcctgggctcaagcactcctcccaccttagcctcctgagtatctgggactacaggcacatgccaccgtgccccactaattttttattttttgtaaagacagggtttctccatgttacccaggctggtctcaaactcttgagctcaaacaatctacccaccttggtctcccaaagagctaagattataggcgtgagccactgtgcctggcttgttatttgcatttgtgattttaaaattccatgttttttatcataagattgtcaggtgctttctggacaggaaatgccttaatttatgactcacaaacaaatgtaggtgatcaaatgcatatctatgtcttcaatggaaatatatatacatataagtcattaacgaagacaaatgagaacatgaaattcatgatatattttcttttccatcacctagccccctaaaggagagatctttttcattcagagccctgggttttgttttgtttcatgatttgctttttttttttttaaataagagtttatttatttatttatttgagacaagatttcactcccatcagccaggctggagtgcaatggcgtgatctcagttcactgcaacttctgcctcctggactcaagtgattctcttgcctcagcctcctgagtagctgggactacaggcacgtgccactgcatccagctaattttttgtagagacagggtttcaccatgttggccaggctggtcttgaacttctgagttcaagcgatctgtctgcctctgagtctcaaagtgctagggttacaggaatgagccaccgcgtgaccaaaagagtttattttttaaagaaaattgacttctttgaaaacgtagaaatgaggccgggtgcagtggctcacacctgtaattccagcactttgtgaggccgaggcaggtagatcgcttgaactgaagagtttgagaccaatctggccaacatggtgaaaccccgtctctactaaaaatacaaacattagccgggtgtggtggcgcatgcctgtaatcccagctactcgggaggctgaggcaggagaatcgcttgaacctgggaggcagaggttgcagtgagctgagatcatgccactgcactccagcctgggtgacagagtgagactccgtctcaaaaaaaaaaaaaagtataaatgaagcacaattaacgtgttataattttatagagcaaaagttcataaaaataaatattctaattaactctcctacatcttataaacactattaccaaacccatttaagattgaagataaattatatcatggcatgggtaaagattttcaataaggagttgctaggataaaagccaaaattctccagcataaattcactgacagggatttctgtttaatcttttcaaaattctaatacccaatttatttcctctagagaataacttgtgtagaatcataacctctttggtggaccttgatttttccatctgtaaaagtatagaactagttttgacttaacagtcaacaaatgcctaccctctccatatctagctgattagagcgccctcatgtgcgcatttgctgtaatgttttagaaatctgaaaaagacaatattaatctcagcagtaatacaataaataatgtcttcatttgcacatttatagcaaatgctataaatatatagctccaagtattactcagtaaaagctaaaggcaaatgctgtagtaggttaatcttactgtcgttcactatcaaacctttcatatgccaattttatcctaaaacagtgaagttattcttttggtttcaattttaatttaatgacttaagggattttttcccttaaaacttctaagtatttcattataatattatttcatcattaggcttaaaggaaaatatgtggtcaattgagttgttatttactatacatgatagcttgacatcatctttttagggatggaaaacagctccagggaccaagtctaactcagttttttggtataagaatttacctgtcggccgggcacaatggctcacacctgtaatcccagcactttgggaggctgaggcgggcggatataggtcagcagatcaagaccaggagttcaagaccagcctggccaagatggtgaaaccccatctgtactaaaactacaaaaattagccaggtgtgatggcaggcatctgtaatcccacctacttgggaggccaaggcaggagaatcacttgaacccggttcaagtgagctggttgcagtgagccaagatcacgccactgcactccagcctgggcaataagagcaagactccatctcaaaaaaaaaaaaaaaaaaaaaaaaagaatttactagtttaaatcataacaatttcttcctactcaaagagactacattggaggaagccaaaacagaagcttatttatttatttatatactttatttatttatttttgagacagagagtcttgctctgtcacccaggctggagtacagtggtgtgatctcggctcactgcaaaatctgcctcctgggttcaagcgattctcctgcctcagcctccctagtagctgggattacaggtgtgtgccactatggccagctaatttttgtatttttagtagagacgggttttcaccatgttggccaggctggtctcaaactcctgacctcaggtgatccacctgcctcagcctcccaaagtgctgggattacaggcatgagccaccaagcccagcctagagaagcttattttttaaaagaaaatacacaaaaaaatcaaaatctcttaagtccaattgtaattttttttagcttttaaaaaatgttaatgccctcaaatattctcctatccaatcactgtattttaaatggcattcctccaacaaatatttgttgagcccccactatgtgccaggattgaaatgtcaaattgaaggaggcaatagctactgaagtaaagcaaaaaaaagtactggttatttttccttctataaaatgacctagtaataaccgctttacccaggagagttgctgtaaagatctaataacatgacacatataaccacacccctcaagaatgaggtgttaccgcatgttctcactcataggtgggaattgaacaatgagaacacatggacacaggaaggggaacatcacactctggggactgttgtggggtggggggagtggggagggatagcattaggagatatacctaatgttaaatgacaagttaatgggtgcagcacaccagcatggcacatgtatacatatgtaactaacctgcacattgtgcacatgtaccctaaaacttaaagtgtaataataataaaataaaaaaataaaaaaaaaatttgcttaaataaatattataataaaaaaatgaatgaggtgttattaaaatgtttgcaagagaaaccctaggaattccaagcacatattttaggaatggtttcttgtgtagaaaatcctggaatgtgaggctctgctcatttttttaatgcatattctcttcttatgtatgtggaattttttttttttttttttttttttttttttttgagatagagcttcgctctgttgcccaggctggaatgcactggcatgatcttggctcactgcaactgccacctcctggtttcaagtgattctcctgcctcagcctcccgagtagatggaattacaggcgtgtgccaccacacttggctaatatttgtatttttagtagagatggggtttcaccatattggccaggctgttctagaactcctgaccttgtgatccacccacttcagcctcccaaagtgctgggattacaggcatgagccactgcacctggcctattttcgtttttactaatgtttaaagagacccactttatgtacagaattctggctacaacctaacaaatgagttgctctgttcatccgttatagccaatttaagtaattatgaaaagctcaacaatactttaactggcaatgaaagcatcaatatctcacatttaccaccacaacttaggatttcttggtagctaaataaaatgcttctattttgtggggggaaactgtcacataagttgaaattctgcaatgttcaattgttgaaaaggtctctatgttaaatcaaaggtataaattccacatcagtagtatatgaaagagaaaaaaaaaagccaaaattaaagtgattcatgcccacttccctaattgaacctaagattttactaacagagatgccgtaactttgatcatgcacacatcaaacttgaatttaaaaacatgcatgcactcactcatcttttatctcttatgtaattaatactgtaagattatattttgcctacgtgctctatattactaatttataggattattactattcagtgttgtttacttgaaaccatactgtactatacacaacttttgcattccatgctaactttatttttttaattaatttttttttatacagagtctcactcactctattggccaggctggagtgcagtggcacgatcttggctcctgcaacctctgcctctcgggttcaagtcattctcctgcctcagcctcccaagtagttggtaccacaggtacatgccaccacacccggctaatttttgtatttttggtagagatggggtttcaccatgtgggccaggctggtctcgaactcctgacctcaaggttatagacgtgagccaccatgtcccaactccatgctaactttagagcttatttcccatcccataagatacaacactacttgtgttacatagggagcagtgtggggaagaaaagcatagaattaagttagtgacaaatccagtgaactcaaaaagagggaaaaaaacactcccaaacaattgttttccccatattctattctccctagaggtagtccatacaggaatgacaaaagaaaaaaaaggatacaaaatgagaaagatgttcatgtgacatataagtacagtaataaaatcaacaagcatatatgatatttaagcaaaatagtatgtatgcattgatggtcatctgatataaatccatcatttctgttggccaacatctaaaacctttacttttctgaggagacaagctataaatctatacggatatttctacaatgagaattcactattacatatgaaccaatataatttgatgtcaaatattcacaattaggtttaaaaaatcccctacttggccgggcgcggtggctcatgcctgtaatcccagcacttggggaggccaaggcgggtggatcatgaggtcaagaaatcaagaccatcctggccaacatggtgaagccctgtctctactaaaaatacaaaaattaactgggcgtggtggcaggcgcctgtagtcccagctactcaggaggctgaggctggacaatcacttgaacccaggaggcagaggttgcagtgagctgagatcgcgccactgcaccccagcctgacgacagagtgagactcagtctcaaaaaaaaaaaaaaaaaaaaaaatcccctacttatgttaagagtaccaaaaatagggccaggaatgatggctcatgcctataattttggcactttgggaagccgaggtgggaagatagcttgagtccaggagtaaaatagtgagactctgtctctacaaaaaaataaaaaattagctggatgtggcacacacctgtagtccaggtactcacgaggctgaaatgggtggatcacttgagcctgggaggtcaaggctgtagtgaactgtgatcacaccactacactctacacccagcctgggctacaaggtgagaccctgtctcaaaaaaaaataaataaataaaaggtaccaaaaatctatagctgtttcaggaataaaatacatgtagttagtgaggtttttctctcccactgctatgacttaatttttggttgagatgctaagccaaacatcattttaagtctgtggcccaaccaaaaaagggaatcatactctccaaagaattgtacattcccactctaattgctaaaataaaatgttggattatgaaaatcaattttgtaggtatcaataagttataagagcatggcttatttaaaaaaaaaaaagtgggccaggttacctacatgagctgcaaagcaagcaaactgaattttcttatcgaagagcccatcctcatacttaaaatttcccatgactacatggaaattctttcacttaccagaaagacctgattggcagtttcactgagagttgcgtcatctgggctgtcgacaggtgtctgacgtgtaaacttggaatcaaactgacttacatcctcttcagattgctttatacaaacaaaataatttagaaaataatgaatagtccatatgacatcaatcaaatgcactgtaagctctgggagctcttttcgcaggggttaactataataaagtattagaatagtcttagcaggcactattctaatagtggagaaatgcaagtggaagaaaaaaatgcaagtggaaagtactgagtcaaattacatcttcaaatcttaaacatgcgctaaaaaagattttagtatactgttattcctattaaaaatgtgaatatattgactgggcatggtggctcacgcctataatcccagcactttgggaggctgaggcgggcagatcatgaggtcaggagttcaagaccagcctggccaataaagcgaaaccccgtctctactaaaaatacaaaacattagccgggcatggtggcaggcgcctgtaatcctagctactcgggaggctgaggcaggagaattgcttgaacctgggaggcagaggttgcggcaagcagagattgtgccactgcacaccagcccaggtgacagtgcaagagtctgtctcaattaaaaaaaaaaaaaaaaatatatatatatatatatatatcgagctcaaaacaagctggaaaaaatgtgaatatcaatttcccctctcacaaagcttcagtgtgcctagtccactggctaaatccctgtttagagataattagttcagttggctactgcaggtttgtaataaacctgaaaaactactgaagcagagttaaaacatgaataatactggcaagatgctccagttaaagtttcttcccacagctcatttcattccttcagaaaactaaaggagcaaaaataattttctattctgcatgggttataagttatatttccttgtgaaagtatagttatcacttcagttctaaccatgagatttatttatttaattccttctctctttcccaaaatatctggttaaactcttgggccaaatgtaagaagtaaataataatttagaatatctgacttaatactaaaagatgatgaccacattgaccttataattctctcagagcccagactgtgaacctgcactccctggaggaatggctgattccaagtgtggggaaaatgtacaagataagcatagaacaccagtttccttattttgctctttcgtacaacaccagacaatgtgctcatgtcaaaaggactcagaacccaacatgaagatgcacccagcattcactgcacccagcattcaacgaagggaaaaaataagcaccaataaaaataactgctaggtgcggtggctcatgcctatcatcccaacactttgggaggcagaggcaggtggattgcttttgagctctggatttgaagaccagcctggtgaacacggcaaaaccccatctctaccagaaacacaaaaattagctgggcatggtggtgtacctgtggtcccagctactcaagagggtgaggtgggaggattgctggaggtcgggacgtcaagcctgcagtgggcagcgattataccactgcactacagcttgggtgacagagtaagaccctgcctcaaaacaataaatgaataaataaaaataaaataaaaataactgcaatgaaatgaaacacaaatgtgttaaaacgtgtaagttcataatatactaaaaaagaaaaaaacacacacacacaaagttcattggtcaattctggaagatgctagggaactaattcattattttgaaaactaggaaagaatcaaacatacatcctgcctttcctgtatgaactgtaccttgggtaactaactgatcaaagagtttctctttatgaaagaattccagctaacaaagaaagaagaagtaacagttagaataaaaccatttcacaaacacctgatgaaactataaaagtaggctagagtttctcaacctcagggctactgacattttaggcctattaatactttgcgttagggggctgtgctgtgctgactcttacccctgaaggtacctatagcattccctcccccaacctgtgacaatcagtgtgtctccagacattgccaaattaccctggtagtgaaatgctgacacaggcagtgaccactaacataactaaaaaaacacacatacacacacacaagtacacattatgcctcctgatcaaagcatatgcgatactgagagtgtaatctgaatcagatcaaccacctaaatttaaataccagtttttggaaatttggggaacagatgaacatggtcaatgaaactctggggataatatcagcaaaatcaaaatttgagaattctacaggacaaatgaccccgtttcttcaataaatcacgaggggaatctataaatgaaaagagacctaagagacatagtaaccaaactacatacagaccttgattaaatccttacaaacaggagaaaaaaaaaagaatggaacaacaacaacaaaaaaattaggtggggcaacacagggagacctcatctctagaaaaattcaaaaaattggatgtggtgatgcacccctgtggtcccagctatatgggaggatcccttgagcctgggaagctgaggctgccatgagccactatcatgccactgcactccagcctgggcaacagagataagaccctatctcaaaaaaaaaaagagaaaaaaaaaaaaacctggggaaactgtcaacttcttaggtgtgatgatgggatgacagttatgtttaaagaagatgatctaattatttttaagctgggcagtaggtgtatgacagttctcctccttacaattgtttgttgttttttaaagtgggtcacattatgctccatgaccaaaaaataatcatcatcaccatcctcctccttctccacctacagcccaaggaatggaaaaagaaactgtgttttctcagattctgaggtggcagaaagacaatagcacactaactcatttactcataaacatattgttatggattgaatcgtgtcccttacccaccccccagaaaatttcgtatgttgaaactctaacctctagttcctcagaatgtgaccttatttggaaagggttattgcagatgtaattagtgaagatgaggtcctactggagtagagaggaaccctaatccaatatgcctggtatccttataaaaaggggaaatttgtccacagatatgcacacaggtagaacaccatgtgaacatgaaggcagagatccaggtgatgcacctacaagccaaagtatgccaaagatgaccagcaaaccaccagaagccaggggagaggcatggaacataaggtttctcacagttgtcgaagaaaccaactctaacaacgtgatctagaacttctagtctccagatctatgagataataaatttctgttgtctaagccacccagtttgtggtactttgttgcagcaagcctagcaaactaatgcacacatattctatattttgaagaaaaaattcccagagaatcatatttaaaatggttaaattaagcaaaataaaacaaaccaaaaaaagaaaagtcccaaccacctgaaatatttaattgttttaggaaactgacttaaaaatatctaatacaggccgggcgcggtggctcacgcctgtaatcccagcactttgggaggccgaggcgagcggatcacgaggtcaggagatcgaggccatcctggctaacacggtgaaaccctgtctctactaaaaatacaaaacattagccgggcgtggtggcgggcgcctgtagtcccagctactcaggaggctgacgcaggagaatggcgtgaacccgggaggcggagcttgcagtttgccgagattgcgccactgcactccagcctgggcgacagagccagactctgtctcaaaaaaaaaaaaaaaaaaaatctaatacagtcaattgccactggctttagttctttaaaagatagtacaaaaataaaagatgcttggctgggtgcagaagctcacacctgtaatcccggcactttgagaggctgaggtgggtggatcactggagcccaggagttggagaccagcctgggcgacatggcaaaaccctgtttctacaaaaaatacaaaaaaattagccaggcatggtgacacgtgtctgtagtcgcagctattcgggaagctgaggtgggagaatcacctgaatctggggaggtcaaggctgcactgaactgtgatcgtgctactgcactccttcctgagtgacagagtgagacctcgtctcaaaataaaatgaacaggccgggcgcggtggctcacgcctgtaatcccagcactttgggaggccgaggcggacagatcacgaggtcaggagatcgagaccatcctggctaacacggtgaaatcccgtctctactaaaaatacaaaaaattagccgggcgtggtggtgggcgcctgtagtcccagctactcgggaggctgaggcaggagaatggcgcgaacccgggaggcagagcttgcagtgagccgagatggcgccactgcactccagcctaggcgacagagcgagactccatctcaggaaaaaataaataaataaaataaaaataaaataaataaaaaataaaaacaaagatgctgaagagaggataaaccagagatctttgaaccgctaataaaaataatgtttctgtctgctctgagatttttcttttctttttttttttttttttgagacggagtcttgctctgtcgcccaggctggagtgcagtggcgtgatctcggctcactgcaagctccgcctcccgggttcacgccattctcctgcctcagcctcccgagtagctgggactacaggcgcccgccaccgcacccggctaatgttttgtatttttagtagagacggggtttcaccgtgttagccaggatggtctccatctcctgacctcgtgatccgcccgcctcggcctcccaaagtgctgggattacaggcctgagccactgcgcccggccgagatttttcttattctaaaaaaaatctcaagcgatcttcctgcctcagcctcgcaagtagctgggacttacaggcacaagccaccacacccaactaacttttaaatgttttgtagagatggagtcttgttacgttgcctatgctggtcttgaactcctggcttcaaacaatcctcccacctcggccctttaaagtttggggattacaggcgtgagccactgcacccaattatacgctttcatgtatacttaccaacagaggtttaaaagggggctccaccttttgagccagaagttcttcccagttaatgtgtctaaagaatggatgagcctagggaaaaaaagcagaaagaaaagttgaggggaataggctttgctggattgataaattaatcacctttttgaagttacaagtcaaaaaataagctaaacttataagcaactacatataaccctcagaaatacataaaactagcattatcttccccacaaaacaccaaagatgccaatctctacttgaacttctccagcgtccccaggaccagctcacagagaagcagcatttcttttcagcagctttaaagaggataaagaaccttagtcaaactgatttttttcctttttagactttgcttgtctactttgccttgagaaaatatagtttattggctgggcacggtggctcatgcctgtaatcccagcactttgggaggctgaggcaggtggatcacctgaggttgggagtttgagaccagcctggccaacatggtgaaaccccttctctactaaaaatacaaaaattagccaggcatggtagggcatgcctgtaatcccagatactagggagactgaggcaggagaatcacttgaacctgggaggcagaggttgcagtgagccaagatcatgccattgcactccagcctagacgacagagtaagactccatctcagaaaaaaagaaaagaaaagaaaatatagtttactaattactgctgaataattgtttaagggtctgtaatcccagcactttgagaggccaaggcaggtggatcacctgaggtcaggtgttccagaccagcctgaccaacatggtgaaatcctgtctctattaaaaatacaaaaattagctgggcatggtggcatgcacctgtaatcccagctactcgagaggctgaggcaggagaatcgcttgaacctggaggactgaggttgcagtgagccaagattgcaccactgcactctagcctgggcaacagagtgagactctgtctcaaaaaaaaaaaaaaaaaagaattaaaaaaaagaatatgaaaagaaagtcgttaaacaaatctgtaccttgccttcaaaatttaaagacttttttgttcaatatatattattcaaaatacacattaaattctatctagttaaatcctagacattgaatcttacagtgtcagtgaccatttaagaaccttacctttttaagcagatctctggcttcttgtgtgaggtagggaggcaaattgagtttacatttgaggatgttgtcaattgttttctttctattctccccagtaaatgggggctgagagtagaagacaagtgaaaaatattagcagggagtgaaaaatattagtatatatgaaacaaattttaaataacaatatccatttcctgaattagttatgcatggagatcagaaatgtatgctgtgaaatgggctaactgctaaagacctttattttgttttagagacagggtctcgctatgttgtcaaggctagattctactaataatccttagctcaaatgatcctcccacctcagcctcctgagtagcttgggctacatgcatgcaccctggtgcctggcagatgtgcagtttttaagcagcaggacaggggaagtagcagtgttctggaaggaagcctgtgttttccaccattaacttgctgtgtgataataagtgagctatgtgattttatgcttcaatttctccatttataaaataagggcattatctgttcaacatctatttcacaggactgccatgacatagatcatttaaatgaaaatgtttcggaaagtatgggatcccatataatcatacagcattattagtgttaaactgctaataacgaatctttgggctttgaaaactccattggcaacattttcacaaagcacaggacaggtctctcgctacagtgactcagcacagaccataatacatgcagcttttaaccgtgcacctactgctccagtcagcatgtcatacattaatgctcccaaactccatcaatccacagcacgattgtggccacttctcatcaagatttcaggggccctacaataaggaaagtaatatgcttaaaaatgcacccatttgcatatcatctgaattagaattaaaaaaaatacagagtcaattaggctacagaaaacagatactattccttaaaacaggtaaaattagctattacccccaaaccagttatgtttaacatgcagctcacatgtattctattgttccacaaaatgtgtgtgtgactgttccatcatgaatagattctttgcgtagtccaaagtctgttagtttcatatgacctacaatgaaagattacagcatgattattctcagaattccaagtatgtgcagtgtttgaacatgtcatataacaccttagtctatccttccatttaacttttcttgcctcaaacataatctctctagtaaagagaaaataaagatagagaaaaaagtgaaataacctgtttaaggctctagctttaagtatacacagaatccttgaccatcctgaaaaagaaaaatcctgttttatgaagacaggattttcataaaactgttttatgaagtctagtttaagtacacagatcctaataaacatattctgtaccttttaaacaaaggtgtgagacagcacttcaaatatatagcttttatcacagtgaactgtgaagagttcttaaaatggtctcagaaagtcactgtaataaggtagctcattctacccaatgctactaattcggggaaagaaataaaattgctagatagtatgaatcaatcatcgctgatccagaaagtaaaaaacttaccaccttatacaaagatcatttcagttcaagtttagcttcctttactggactgtcataacaagtggttcaacaacctcagggactctagtatttgaggttcatttcacagaaaaggcacaatgacctattgattcaaatgtaaacatatgctacactctgatacagaagaagaatggcctttattttcacagaaccatctgatacactcaaccttataaatcaaagaagaagttaactattctatcgctcccctattctatcctgtgacttagaatttagatcagaatccagattttgtggagtgaggaggtgttgatgagaggaaggaagagacactgattcccatgatatattcagttaagtatatcatttctccttaaaaaaaaaaaaggtaggtggaggagtataatctggaatgtttatatgagcttcggttgttcatacatcattttttaagagtttgaaacaattaactacctcatggattactctgtaggcatctaatgattaacagctgctaccaccttctagataccctgggtcagctggttgctcctttggggtatgagcgaattgccaagtctacccacagcccagattagcataaattgagctgtctgtagcagcatgcagttgtagtcaaggctcactgagctatatctatagttgtatagattatcagtctctctgatgtttatgtttgttgttgcaaacaaacagcaagaataaactgattctggcagtgggggaggtgggttatgcctataataccagcaatttgggaagccaagtcaggtagatcaactgagctcaggagtttgagaccaccctgggcaacatgatgaaaccccatttctacaaaaaataccaaaaattagccaggcgtggtggtgtgccacagtggccccagctacttgaggggctggggtgggaggatcacttgagcctgagaggcggaggttgcagtgagctgcaatcatgccactgtattccagcctgatgacagagtgagacccccatttcaaaaaaaaaaaaagagtaacccgacgcgtactaaacatcatattcccaaagttttatcaaatactttggttcaatttcaatcctttttccagcattaataaaacctactgtaagaagcatagcttctaaaatatacatattttctttttctttttctttttcttttttttttttttttttgagacggagtctcgctgtgtcgcacaggctggagtacaatgtcgcgatcttggctcactgcaactttcgcctcctgggttcaggcgattctcccacctcagcctcctgagtagctgggattacaggcacccaccatcatgcccagctaattttttttttttgtatttttgtagagatggggtttcaccatgttggccaggcgtcttcaactcctgacctcaggtgatccacccaccttagcctcccaagtgctgggattacaggtgtcagccactgcgcccagccaatatttacatattttcattattaaaactcaacttatataattgagattcacttttcaatttaagtaacaagccaaaattaatgtttagactggcttttacagtctaaaacattatacaacatttgatgtaaggattccaaaaacatgaaaaactataaagagtaaggattaaactaaaaaaggcagttgagtgactattatcctcaacttcttttactctcaccaagcgtaattacctaaagacttaaaatatcagcaagtactatgatgccatgaattctgagggaggaaatatacaaaatagagagatgagtatggggctttgaaaatggccatgacctatgtgggaggattttaagatgattatttactatagaattgtttacggtatgtctccaccttggtgattaagaatgatattctccggcttcaggtctctgtatatgatccccttttgatgtaaatgtcccaaagccatggagatttctgccaagtaaaagctgtaaacaaaagtgatttaataaaattaaaaagagtgtaatctatccaaagcagtttatgtatggagcaaaattcctggaaagaaacagacatgcaccaaacaccaaattagtggggtagggggatgtatgggaaaaagagatggcataggatgctgccaaaaggcatggggacatttatgtttcactcattttagtgaaactataaagtgctttattttgccattagaatatactgctaaaattgcaaagatgtccagaatatgctaaactgccattggtcatgttttgttctgtctgtgtaggaattaagctaatagccattcatttcaagcaaatttctcccatccacacccaactttaaaatcccataggaaataggaactttgttattctcagagatcacgtcttgatttcaaaaggtatcttataacctgacccttagaagcccactcatcctttacttaatacagctacggatttatagacagctcaggcccacagtatctgccctccctcctgccagccagcccacaactataaactgtgtgacactcaaatttatctacctcaaaagaataaagggctgaatcaaccgtctggattcgaaaagcacaaggcactgcaatactggctgcataacaacgttgcaatcctgcagattactccaggatggagagggtgtgtcctagaggactgaggcagtttcacagccggcacgaccacaaacacagcctccaacacggctcagtgagcctcctccaaaaaagggcacttcatccctaaggctcttaaatgcagcttctgtgttagaaaaggcctgaaattaaacaatggaatacagttttggtaattaaggtaaaaaaaaatttaagtgttgttttctattaaattaatgtgtaggataaactgatttattgtgacccaatattgttgcttcacaaaaggatgtgcatatttttaatctgaagcagataacatgtttagaaataggagggtaaatcccatcctgactatataatcaatccacagatgatatgaccaggcttatcacctccctaagactgcaccttgagaaatagcctaaaaaaaaagggatgatttctgatcatttccattgttccacacataaaggttcactgggaaaccacactcacccacagccaaggcaggcagcttaccaattcaaggaaagaaagccgcaatgagaatgcttctgttaggaacaactggtgtgaagagcgttccactcaagcctaaggcaaaggaatgatgtgacctccatagctgcccagtcccaaaactgcttctcccccttgaggtcctgagtcagtgacaggctccagatcaatttactgaatcatgtggctgcccgcagtgggaatggggctttgcttgtaattacctgaatctatgcaaaaagttcacttaccaggcagtgtcttccataaatattccctctctttctaactgcataaatagttctcctcctgtaaagaaaaagaaaaaatgttagaaataaaacagtatggccaggcgcagtggctcacgcctgtaatcccagcattttgggaggccgaggctggcagatcacgaggtcaggagatcgagaccacggtgaatccccgtctctactaaaaatacaaaaaattagccgggcatggtggcgggcgcctgtagtcccagctactggggaggctgaggcaggagaatggggtgaacccgggaggcggagcttgcagtgagccgagatcccgccactgcactccagcctgggtgacagagcgagactccgtctcaaaaaaaaaaaaaaaaaaaaaagaaaagaaaaagaaaaaaaagcaataaaacaatatttatttccaacccacttctaatgagagagtttgtgctttccttctaaccataattaaaagacatcggccccttaaaaatgaaaaacaaatcctaaaaattataggttttaaaactaagtcctcaggattctatttttagtagcattcttattcttctgtaacacacatatgtttaaaaactagaactggcttggaattccaggttttatatctataaactttgaaatatttgtagattccagacgtgaggttaaaaaaaaaacttgattaaagactctttaacattttacccataggtagaaaaatgatagtctacaattaaatcaccctcactaattttagtgaatgttcgtatttcgtattttcagaacccttaaataaacagaatgaacctggcagtgtcctagtaaaaaacatggcacaatttgagtatcaaaataaataatgataataaagggttatatcacattgaatgatattagaatccctaagtccacaatgacataaataaatgaatagataaattttttaaatggggaagaagagaaagttccttattacagtagaatgccaagtagtaaatgaagaaggcatgacagagtaagaaaaattacttggcaaacatcacaactaattgttgcagacaagaatcaatggatgtcaaaactgaatgtgggccgggtgcagtggctcatgcctgtaatcccagcactttgggaggccgaggtgggcagatcacctgaggtcaggggttcaagaccagcctggccaaaatggcaaaaccccgtctctactaaaactaaaaaagttagctgggtgtggtggtgcctgcctgtaattccagctacccgggaggctgaggcaggagaatcacttgaacctgggaggtagaggttgcagtgagctgagatcccgccaccgcactccagcctgggtgacagagtgagactcggtctcaaaaaataacaacaacaacaacaacaacaacaaaactgaacatgaaagtttgatggaagagacttaaataatctcaaagtatctcctcaaaagatacttattaattacaaaggcaaaaatgtcaccagggaaaaaatcggcagacaccaccttatacatgtgaccgaagttaacatcacaagtaataggacaaagatataaatatcatgtacctcttgatctgatgcattaaggaggacacaatgtcacttcaatggtcctgccaaaattgcataacctgaatctaatactaaggaaacatcagctaaacccaaagcattctacaaactaactggcctgtgctaatcaaaaatgtcaacatcatgaaagtcaaagaaagattgaggaaatgttccagattaaaggaaactaaggagagttataattgcatcaatgtcaatttcctatttctgatcattttagtatagttatgtaagacactgtccttgattttggaaaatatacactgaataggctgggcgcagtggctcgctcctgtgatcccagcactttgggaggccgaggtgggcagatcacctaaggtcaggagttcgagaccagcctggtcaacgtggtgaaaccccatctctactaaaaacacaaaaattagccgggcgtggtggtggatgcgtgtaatctcaactactcggcaggcagaggctgtagtgagcccgcgattgcgccactgccctccagtctgggcgacagagtgatactccatctcaaaaaaaaagaaaataaagaaaacatacactgaaattttaggggtaaagggaaatcatgtctgtaacactctcttaaacagttcaaaaaaattatgtatgcatgtgtgtatatatgtatacacatatatacatatacatagaaggataaaacaaaataaatgtggtgaaatggtaacatttggggaatccaggtgagagatatataggaattcttttttttttttcgtgactgagtctcgctctgttgcccaggttggagtgtagtggtgcgatctttgctcgccacaacctccacctcccaggttcaagcgattctcctgcctcagcctcccgagtagctgggattacaggagcacaccaacatgcccggctaacttttctatttttagcacagacagagtttcactatgttggccagactggtctcaaactcctgacctcatgatccacctgccttggcctctcaaagtgctaggattacaggcatgagccaccgagcctggcataggaattctttatactactcttaaaactttttaagtatgaaattatgtcaaaataaagtttttctgggcgggcacggtggctcacacctgtaatcccagcactctggaaggccaaggcgggcagatcacctgaggtcaggagttcaagaccagcctggccaacatggtgaaagcccggctctactaaaaatacaaaaacatagcccggtgtggtggtgcatgccagtaatcccagctaaatgggacgcccaggcaggagaatcgcttgaacctgggaggcggaggttgtgatgagctgagatcactcctctttgctccagcctgggcaagaagagtgaaactccatcttcaaaaaaaaaaaaaaaaaaagtttttccaatggcaatactcacaaaaaagttgctacattctgcacctttctgttccatgttacatgttactgcaaaatctttctcagagaactgaactgtgtttgctagaaatagatacctgtggccgggcgcagtggcttacacctgtaatcccagcaccttgggagtctgagtcaggtagatcacttgagatcaggagttcgagatcagcctgaccaacatggcgaaaccccatctttactaaaaatacaaaaatcagccgggtatgcctgtaatcccagctactcaggaggctgaggcaggagaatcgcttgaaccccaggaggcagaggttgcagtgacccaagatcacaccattgcactccagcctgtgcgacaagagcaaaactccatctaaaaaaaaaaaaaagaaatagatacctgtgatctagaaatgatatggaatcaacaagttcctacgaggtggtaggccctggcaaatgtggatgatttccattataagctacatactccatcactaaggctacattaaactaaaaactcttgtttaaagactcaattccaaaaatagtcagtatgttaaataatcctcccaattatttaaattacagtatcttaccccagtacaatttgatggctccgcatcacttaggtatttgtttttctgttaagtgactgattataaaagaattaaaatacaattttatagatgagggaagcaaatctttagtttccaccgtatttgtctgccagtagaaacatttggtcacatctgaattttgtacttcagtgtactcatcaattttaagcactatttgatcataatgggaaaaagtatttttccattgaaaaataacattttgaaccagtttttggagcaaaggcaaataattacaccaaactctgtgtactgaccactgagatactcaaggatgaggtagagttttccaccagtctgaaaggcataagttaaatccacaatgaagggatgccttacttcctccagaatattccattctgcttttgtatgagctgtatctttagcatttcttactatcattgcctaaaggaaaagagatgatctataagaacaaaatagtgaacatttttattctatagtaactggaaaatctattttgtgcttttcttgccaatattgaactattaaccatagttcccactagaaactgagatggggtgatggaaaacattcactttatatatgcctctgtgcagtttggattttttgcagtgaacatgtaaatcaatacctgaagagactttttaaaaaagagatctgtaatcagatcaagtttattcatatattcacaaactattgagtgtctaccatgctccaggctgtgccaagaaagcagaatagaaggaatgccctgtccataggagcccaaaagtccacaggatcccaaagtctcagggaaaaaaagacaagtcaatgtaggcaagctcaggatggtaagggtaaacaggggaactacatctaacctagcagaaagtcttgcttgaaaggtattaaaatgaaaggtggcctggacgcggtggttcatgtctgtaatcccagcacttaggtaggcagaggcaggaggatcgcttgagcctaggagttcgagatctgcctggtaacaagcatgaccccattctccacaaaaatggtaaaaaaaagaaagaaagaaagaaatgtagaaggtaaaaaaaaggcattccagtgcaaaagaggcttgataggacaggatatgtctggggaatctacaagtagttcagtatggttagaagtggttagagattaggctagagaagtaggtagaggccaggaaatggaaagtctggacaaaggaaggtctgggtgaaatgaacaaatatttggctttacgacagatacttctagtagcagtagggagtattaggaaagaaatgagactagttaggaggctagtataataaaccaactaagaagatctataagaaatgaaggtagaaaaaaatgaaaggctaagaatacataatttgcatttgctgacaaactaggtatgagaggaaatgatgatacctttatttctgcataagtaataggacagataatggtgccattcaataatggcaaatgaaagtgaaaaagttttgggaaaatgatgccgttttagacatgccaggtataagttccaggaagttaccctgtggtacatctccgtaagtaatatggaaagcaaatacacaggttattggttgcaacattatctgtgaaagtgaaacactggaaacagcctaaatgctgggacataggatattggcccaaaacctatggaatctacacaacatgtaacaaagctataaaaatgagaaaaatctctataaaaacaagatacaaaagagtatttaaaaagtacaacagcatggatacaatgctatcttttgtacaagaaaggggaaatgagaatatatatataatatgtatctgcttatacctgcaaaaatgaagacaactaagataaactaaaagctaatgataatggaagggaaggacaagaaataagacttttcagtataccttctgagtaaaacctcaatggttttatcatccatttttttctttcctaaatcaaatattcctgcaattataaaatgtagatttttccttttgaaccatattaatgtttaatatattccaaaaataaaatcaacaaggatgagggctgggaagtacaactgaatacaataggaatacataaatttaattgactattacaccaataactttaccacagaaagagaaagagaaaaaagatataagagaaaaagattttttttttttcagacggagtctcactctgtcacccaggctgcagtgcagtggcgtggtcttggctcactgcaacctccgcctcccaggttcaagtgattctcctgcctcagcctcccaggtagctgggactacaggcgcctgccaccatgcccggctaatttttgtatttttagtagagatggggtttcaccatgttggccaggctggttttgaactcctgacctcatgatctgcccaccttggcctcccaaagtgctgggattacaggcgtgagccactgtgcgcggtgagaaaaagctacttaagtaattttagactgcacacccgtaggggcccatatgtaagcacacaaaaaattgcaaagaaacgttaaacttagtaggtttgtagctggaaatactattggtatcataattttcattatgcatatattgtacaactgaacaaatgactgcatttatttatgttaccagagttctcactgtagaaaaaaaggatatccaaatatgaactgaaagaagaatgtggccgggagcggtggctcacgcttgtaatcccagcactttgggaggccgaggtgggtggatcacaaggtcaggagttcaagaccagcctggccaagatgatgaaatcctgtgtctactaaaaatacaaaaatttgctgggcatggtggcaggtatctgtaatcccagctactcaggaggtggaggcagagatttgcttgaacccgggaggtggaggctgcagtgatccgagatcacaccactgcactccagcctgggggacagatcaagactccatctcaaaaataaaaaaataaaaataaagaagaagaacgctatggaatttgactagaattagggctaacaatatgaagcactttgggaagccaaggcaggtggatcaccatgttggccaggagtttgagaccagcctggccaacatggtgaaacctcatctttactaaaaatacaagaattagccaggtatggtggtgggcacctgtactcccagttactccagaggctgaggcacgagaatcactggaacccgggaagcagaggttgcagtgagctgaggcagcctggcgtccaagctgtggtgagccatgatcataccactgcactcaagtctgggcaacagaggaagtccctgtctcaaaaaaaaaaaaagggccaggtgcagtggctcacacctttaatcccagcattttaggaggctgaggcgggcagatcatgaggtcaggagttcaagaccagcctggccatcatagtgaaaccccatccctactaaaaatacaaaaatcagccgagtgtggtggcatgtacctgtaatcccagctactcaggagtttgaggcagaagaattgcttgaacctgggaggcggaggttgcagtgagccaagaccacatcattgcactccagcctgggcaacagagtgaacctccatctcaaaaaaaaaaaaaaaattaaaaagggagtatagggccaggcgcggtggctcacgcctgtaatcccatcactttgggaggccgaggtggctggatcacggggtcaagagatcaagaccatcctggccaacatggtgagaccccatctctactaaaaatacaaaaaattagctggacacagtggcaaatgactgtagtcccagctactctggaggctgagacaggaggatcgcctgaacctgggaggcggaagttgcagtgagctgagaccataccactgcactccggcctggtgacaaagcaagacttcgtctcaaaaaaaaaaaaaaaaaaaaaggagtataaaaatatctttacagaagaatgacaatatagaaaaaatacagaaaaaatagaaaagtctccattttctaatcactatagtaatatttgatttgggcaagaagcaatccagatgaaaccattaagtaaagattattatgggacagaatattcacactgtttctatcatgccgtagatcacttgttaattacaaaaggaaaaagaggctgagaatggagtctcacgtctgtgatcccagcactttgggaggccaaggagggcggatcaccttaggtcaggagtttgagaccagactggccaacatggcaaaaccccatctctactataattacaaaaattaggcagacatgatagcaggcacctgtaatctcagctacttggggggctgaggcaggagaatcgcttgaacccaggaggtggaggttgcagtcagccaagattgcgccactgcactccagcctggatgacagagtgagactccttctcaaaaaaaaaaaaaatgcccttattcttaggagatgtatagaagaaattaggggtgaagtgctatgaaatctgcagttaactctcaaactgtacaggaagaaaatttattaatgttaaaaaatgtcaatattcatagatacacatatatgtgggggcaggtagaaagggagggacacacagacaaagaaaatatggcaaaatggtaacaactggtgatcactgaactattcttgcaactctgaaaagtttaaaaaatttcaaaggtatattgtttttgaactgctcaggaggtttaaatttttgaatttttaaaataagcaatcaattgtgaggaagtctgagaagccacagacttaagagataagatgaaaaataaggaaagtagagtcacagtaataagaggaacagagtttcaaaatgctgtggtcagtcagtagcttcaatgcaaaagaaagttaaattaaggaccaactcagtaaagacaactggattcagcaactgggaagtcagtgatgacctagggtacaggagctgcattgaaatagtagagctgggccacgtgtggcccacggctataatccagcagtttgggaggccgaggtaggtggacctcttgaggccaggaattcaagaccagcctagccaacatggtgaaaccccatctctactaaaaatacaaaaattaacccgagacagtggcgcacccctgtaatcccagctactcaggggcccgaggcatgagaactgcttgaacctggaaggcagaggctgcagtgagctgagatagggccactgcacttcagcctgggtgacaggggaagactctgtctaaaaaacaaaaaataggcctggtgtggtggctcatgcctgtaatcacagcactttgggaggccgaggcaggcagatcacaaggtcaggagatcgagaccatcctggctaacacggtgaaaccctgtctctactaaaaatacaaaaaattagctgggcttggtggcaggcgcctgtggtcccagctcctccggaggctgaggcaggagaatgacatgaacccgggaggtggaggttgcagtgagctgagattacgccactgcactccagcctgggtgacaaagccagactccctctcaaaaaaaaaaaaaaaaagaagtaaactgggtatgtgcctttagaggtggtgcacatttttagcattataaatgaatataaatgagtggcaattgttactttggtccacagatttttggtatcttaactagtttttggtctcttccactaaaggcattgcctgttgaaccttgttaggaatgtaagtactgaaggcaaactgcctgggtttgaattttgttctgtcccttgcaccctgcctggtttcaaatcctagctctgcttattaagttcttttaagggatgacctttgagcaaatgtcttagcttctgttttcccaagtaaatggacacaatagttgctactttgtgaaagattcatgtaattgaccagcatttaccaagtagcatcagtgtttagtttcagtcattggtgattctgcagttggactgtgagggggtattggggtggggggtggtgtgtgtgtgtagcacttaattgcaggcaggaaggaaaagatacttttgataaccgacaggcagcttttctctgcttttgtgtcaaaagggaggaagggagtttggagagggaaatgaattctctgtaacactaagctctcttccacaaaaacagaggtagatagaatgtgtaataatttacagaatttctagacttcaacgatctgatttttttaatttatttttattttttcaggttgagactgagctaaagttaatctgtggcgacgttctggatgtactggacaaacacctcactcattccagcagctacaactggcaagtccaaggttttctattatgaaatgtaggttctatactaacaattaacaagtgtacttcaataaatttaaacattctcaggaataattgactttgtttctttttttcttagacatttcatattattttccttattaaatataaccaaaaatcccacagaaattaactgaggagcctctaaatatcaacaaaattatcacttgatagactagaattaaacaagcaagtggttccaagaaatggcacgagtgtattaatcataaaataaaatttctacatgaaacattcagccattctagaccatttctgtctgtgcagactcatcttttcttgttctttgcaaagcccagctagagcaagcaagttcttcccaataggtttttcccatctctggttgcttggctggctgggcttcctctacaaacctccttcctttcccctaagcagggcccagtgtccccatcccgcggagttgagctcatgagggcatctgaccaggagtagctattcctggtgctattgtcattgtcctgtttcatgtgtgaacatggctggctctacagagatttggcaggtagcaaggaggtttctttttgaatcttcttttggaagtcagacttggtgaggatcttatgcccactttttcctagctctgtggtgtcaggcaaagtctgtttctgcaaattggggttaagaattcctacctcacagcggtcttttgataaataaataagatcttaagtgtaaattattccactagaaattgcgcagttactttggtcttcatcctggaggtccactgacaagcctcatgcaaacctgtggccctgttcataaagtgttttgatccatactttcaaatggcctcaggaagaccttttataaagtaaaaatgttaggcagccacatgatatccattgacccagtgaggctgttttactggatgtaagaggtttgacccagcattttggggggccgagacaggcagatcacttgaggccaggagctggagacccgcctggccaacatggagaaaccccatctctattaaaaataccaaaaaaattacctgggcatggtggcacatgcctgtaatcccagctacttgggagactgaggcacaagaatagcttgaacccaggagtcagaggttgcagtgagccaagccgagatggcgccactgcactccagcctgggcaacagagtgagactctgtctcagggaaaaaaaaggggtggggggagggtttgaaaaaatagtagcatgtagttatgtttctacaatatttgatatatataaggatttaccaacctcttgcattagctgctatcccctacagcacttgctgtaggaaaaaaacatcaagttctgagctcctactgtttgccaggcatattctgagatgatcacgtttaaatctcagagttaccctgcagagtagtcagggtatcactgcctgacagatgcagaagctgaggcttacagcagttaaatgacttaccccaggccacatagataatgagtgggagagcccaggtctgtctgtgaggtataatgaaattagcataaaccctccacattggcgccactcacataaagtaacatatattctctcacagaaagtattttattgggcataacattttatatcatttaccgtttaacattagtcgtggatcttcccacatcacatgaatatgcctcattgtttttggataatatgattactattgaatggatttactatcattcatttaatcaatactccttttgatggccattttaattgtctattttttccttttgcacagattgatgtaataaacatgattttatagtaatatttttgtctgcctgtgaaaatgtttgctggacaataaattcctaggagtaaaataaggtcaaagattataaatacagtatttattttcataaatattaccaagtcagccacaaatgtttaaattactaatggtttcagattattgtatttaatgagtaaacacttttatagggtttacttttataaacacttttatttgccagatatcattctaaatgctttacaaaattaactttttcaatttttaatataaccctgggatgtatattaggattatccccattctacagataagaacactgaggagttaattaacttgccacatatctaggaagtgacaaggctagttgcacagccaggcagtctggctcctgagtccacattttagacaacactatacctcctggttcttttgaggcattactgctggaactatcctaatactcataaataaacatttcttttggggagggccaaataaaattttaaacagaagagttttcaccaactgtcaagctcataaagttgtacattatacacttttttcatgatgcccacagataatttattaatgatatcatctattttaaaagacatatgtaaaacccaacccttaagaaaggattcctatcactgttccccacaggcaccctcctcagtcttacacctttccaccccccaaaacaaatcattcagcatatttatttcatactgtaatataggaaatagcttctttttagattttcttatattcttaacattgatcataccaacatggaatagaaattccttatgttttatctggatttaaggtgctacataatggaatatatttctatcaagccatacacattggagataatgaaatcacttgtgttctagcttaaacgttgtgggaatttcagaactgcaacataacagataatcctcggatgaaaactaaatctctcctctggtcaggcatctatgtgcatcagtgaagagaagacggggactgtggaagggaaaacagtgagtcacgaaggactgtggccacatctgttccccggaccctcaagtagttaaatcctgacctcccctaccgcatactgtcctggggaatggccaacactggcctttcacaactgtgtgttactagaaatgcaacagaaacccagctgaatccccagggtttcccttctgcccttctcaatggaaagatctgtcccaggaccatttattccaacattttcaattatgagaaatctgggaagataaagttattttcacatttctcaagaaatacatacttattcatactcattacaggaaagtcagaatctacagaaaaccaagaagatttttaaaaatccatgataccaccatcaaaagagccgcacttagtatgttggtccacaggtttcctagcacccttttctgttggtgtatgcacaaaatacacaatcacattctgtctacattttacaatttgccattttttgattaacactatatattgaacaatttttaagacctgcaacatatgtcgacaacattatttcaaaataatatatttataaataaacacacacacaaactgtctgtcttatatacaacacgtcttactttctaattctccactcttgaagatttaggttttcctaactttttaatatactcaccaggaatctgtaaactttttttataaaaggccaaagggtagatattttaaactctgcaggccataggtttctgttgcaacactcaactctgctgttgcagggaaagaagccatacacaatttgtaaatgaatgggcatgactgtgttctgataaactttacaaaaacaggtggtggactagatgcagcctgctcctctggacatggcttaccagcccctgacatataccactacagaggatgctgttagaatgaaatctctttacacatctctgatcatctccttaggactaattgctagacatgacatcatggtagctgtgggtcaaagggcatgcacgctctgggatgtacattgccagattgctcatgatcagcctttctcatgtcaaaatgttttgtgaccaccagaaggctggttctgcttttattatccattgactgaggaatagaaatgacatggcatgtatgcaggatatttaaccatcgtatagataatccttgtgcacaagtgcattctatattctttcccaataagtccacatctgccagagttgaaataaaataaaacaaaacaaacctatttagcaccttctctgtagcaggtccattcatgtatgttgttgtatttcattctcagaattcttatgacctaggcattttaaaaatttttaaaaaaatatttagttgacaaggattgtgtatatttaatgcatacaatgtgatgatttcatatatgtatatattgtgtactaattatcacaatcaaatttattacatccattaccacctatgctgtacacgaaatctccagaatttgttcatcttataactgaaagtttataccctttgattaatagcttcccattttccccaaccccagcccttggcaaccaccattctactatctgtttttatgagtttgactctcttagatcccacatataagtgagatcatacaaaacttgtctttctgtgtctggcttatttcacttagcgtaatgtcctccaggtttatccaggacaggagtttcttctttttaatggctaatagtccattgtttatatatattttgtttatccattcatctgttgctggacacttaggctgtttctatatcttgggtattgtgaatagtgttgtaataaacatggggcacagatctctcttcaaggttctaacctgattgctgaatcgtatggtagttctgcttctaattttttgaggaacatccatactgttttctgtaaaggttataccactttacattccaaccaacagtgtacaagggttctctttcctctatgctttcgccaacacttgttatctcttgtcgttttttttataagagccgtcctatcctatgaggcaatatctcattgtggttttgatttgcatttctctgatgattagtggtgttgaacaccttttcatatgctggctggccatttgtatatcttccttggggaaaaaagtccattggggtcctttgcctatttttaattgggttattcatgtatttattaatttttgctattgagttgtgtgaattccttatattttttcaaataaccccttatcaaatatatgggttgcaaatattttcttccattccataggttgccttttcattttgtcatggtttcctttgctgtgtaaaaccttttaagattgatgtagtcccatttatttattttcacttttgttgcctgtgctttggtgttatatcaaaaaaaaattgccaattatgaccaatgtcgaggagatttttccctatgtttacttccaggatttacatggtttcagatattacatttaatatctgaattacatttaatatctgaattacattaatatctgaattaatatctgatattacatttaaatctttaatccattttgagctaattttctgtatatgatgtaaaacaagtgtgcaatttcattctttttcatgcactttccccaacaccattcattgaagagagtttcctttctacattgtgcttttttttttttttttacagtacagtgaaagcaagtctattaagaaagtaaaggaataaaagaatctacattgtatatccttgatggccttgtcaaagatctgttgaccatatatgcacggggttatttctgggtgagcttggcatttttatctacctcattctaccgatgaggaggccgagtctcagagagttcacagacctgcctaaggtcactcagctagaggtgatacaaccagggtttgaactgagatctgccaggcttctgagtttattctttttcccccacaccaaggatcctcaattctgccttactgacatcaggatccagtcaattctttgtgatgggggctgtcctgcacctggcaggatgtttagcaccttctctggcctccacccactggatgccaggggaatgcagaagaggcttgttcattctcccatttaatcctcaggacaatatctgacataaatgttatgtcttttattttataaatgaagaaaatgagactcagaaaggtttaagtgagttacttaagaacacacagacagcaagaggtagaactggaaactgaacacaggtgtccacatgggacaacaaaaaagttcacgttccatcttcttttgagtctctcatttcaataattaccattgtctggatatgagctgaagtacaggaaacctggggctgaactctcctcccatcaggcctaggagccccagaccagaacgccagcccaaggtctcccagtcaggcccgctggcgtgagctggcatctacactagcatggtttcccaaagctgcagggatgccagtctcgccgctgatgaagaaaatgaagggcatttgcttctcctgcaggctctcgggatttaacacagattcacagattcctcttcttgctgtcttctcccatagcacaaaacagggtggtccatcccaggctcccagtgtcccaaggctttgttgcgtgttctctttaatttctcccactcttgcggtgtaccctaccctcatctccctggcaacctttctgctgtatcctctcgacacctggatcacaagaacacttgtgagaccccttaacaagctacatcccaaattatcattcccctttgtcctcagtcagtgctcaggtccaacttgctctcctggggtgactttctttcctgcccaatatggtttcatcacctgtaaattggggataattaaagtcttgatcctgatatttgactctcaaagcagaagtagcaagctcagccaagtcacttcaacaagaggagacgttccttgtgaaccaaaagggcactggtcacaagggccgctccttcttctctcaggcctctccagcacgcccttggctcagccaaagaagagactcaggctgtgcttctgcactgttgggataacataggcctcttccatgtggttccacaccaggaacatggggacaatcagacctctcccagtgtgggcataaggatacaagatcatgtcaatattgacattcataatggccgggcgcagtggcacacgcctgtaatcccagcactttgggaggctgaggtgggcagattgcttgaaccccagagttcgaaaccagcctgggcgacttggcaagaccagtctctacagaaaatacaaaaaattgtctgggcttggtggcgcacacctgtagtctcagctacttgggaggctgaggtgggaggattgctcaaacccagggaggttgaggcttcagtgagctatgatggcactgctgtactccaacctgggcaacagagtgaggccctgtctcaaaacaaaaacaaagacaaaacaacattcataatagtagcaatagctactatgtgccaagcccaggcacctcttcgagtctttgctgtcaccctatcaggtaagcgtgcttagaagttacacgaagcacacggctcagtgtttggcccatggtaagggcctaaaaagtgatagccccagtgatggggatgctgctgctgctgaccgttaaccccagtctgctccaccttcttccaggcagtctgtgagatgtttgatgtccgaggcaaacagcacattcagatccccaagctctacacctccagtgtgaccaggcacctgcaccacttcaggctcatgcaggactcacagcctttggacctcagctaaaggacttgcttctcttcagcacacggggcttgtttgtgttggggtctgagccctgagccatggtcaaggagacccccaggtctttctgaacagagacagctggcctgggggcctccctctcactgcatgcaagaggctgttagggtgcaagactcaaggcactgagggaggctgtttcaggagggagccccaggagggtggtggagacagaagggggcagcatctgccgagggcctactgtgtgcctggcaccgtgtggggtttctggcccatatgggctaagtgaccctgcacactcctcttaggagaaaggctcagatggagaaattgcagttcaggaaggtaaagcaagctgctagcctgtggccatgttgggatctgggcctcagccttccagccacgaaggcagccaagtgtcatgaagaaggcatcacagaggcaattccaggctgtagtggtgaactttccactctgcatccccgggtgctgtgccctgtgccctgtctaaggtagccctgcgggtttctatatgtttaagttatccccagcatcaatgatgctctcctgtggatcccaagccatggagatgtcctgggacttttcatttttaggtacctaaattgaatttcccaacacatagaagcaagacagctgccctaacagactcttgcatgcagtgagagggaggccgccaggccagctgtctctgttcagaaagacctgggggtctccttgaccatgcgctcagggctcagaccctaacacaaacaagccccgtgtgctgaagagaagcaggtcccttagctgaggtccaaaggctgtgggtcctgcatgagcctgaagtggtgcacgtccctggtcacattggaggtggagagcttggggatctgaatgtgctgtttgccttggatctttatttgtgattcagaaacagtggaataaaaggaaaggaaagaaaacccgaatggccacctcagcaggatgctccaagggtagtgtccaggtggcactgactcagacatgtgggggcttcccccacccatgctcaagagccactttgccatttcaccatctctctgtcctccacacccctcagcagcaagcacaccaagaatgtgttcaccatgaagctcaaatctcagcagaatctagagtctgaaatccaagtaagggaaagtgtagagcttctcggatgatgccctgtcaattttattttaacgaatgaaagaccagaagaagtcagtctttgaaaggagaggacaggagcatctgctggcattagcagccatgccatcgtaggaccagctcacctggacccgcggccacctgtgcttttacatctagtcttggttaaccatgggccacttttccagcttggaaactaagcatatgctccacttcctctccttcctcattgaactctttcactaaaagaacagtgcaagagagacttaaactgtttgcctcattcttaagaactttcaggaaaagtgttggcagggaaggaaatttcccagctctgggaaacagtcttgtggattatctgctggtttaattgatctgcgctgtcctccctgcattcattaggaaaactggccttggttcaaataagaacaggatttgtcctggtgacagagaaaggtttcttctgatgtccatatatctccgagggagatgctttctccaggcagaggctgtggccaagcgatcagggggctcagagggctgctgggaaggggtgggcccctctctccccagagggaaactcctggggaactctcgagcacccctgcccatcctttaaacataaattcataaatacaaacaagtaggccattcacagaaatatataaaatatgtcataggatgggtggcactctcatatggcaataattatgacaggggccggcaaatgacctgagtgacccggactgacctgagcactgactcccaaatgccctccataggatgttctgcatccccgagaccctttcctgggtgctcctgggccctaccaccccctagaccatccagacctcaggtcatccccctgtctgttgacagagtagtctccgttcctgaacgtgctggtcaccagcaacagcagctgctcctcctccaggcagctcagcctatacttctacatgcagagaacctggacggcacccaggtggacctaagccttcagctcccagtagacactctgggcttcctaccctgcccagacactctgggcttccccccacacctcccctcggccggggctcctgtgcgcatctgtctctcccagtgcccagcacaggcgtggaatggaaggggtgaatggaccgatgtgaacacatcatcctggattctccttccccgctcaagccctgcagctaacccatcggcaagccctgggggctctgcctccaaaatcctgcctatcccatgtccaaacgcctctcaccatgtccactgctctttgcagttctgtgtgtgtggaaatatttccccaaaattggaatgagcaggtcacagctgtgcctggagggaacggccagggaaatgtgccctcgccttgctgttctatccaggcccacccagctgaggatgggggacctgccaccactctcctggcagttccggactcctgggaaccggcaggtgaggacccaagagtgttttcagtgacccggctgacctggtcatccgtcagtcccaccttggcctaggcctctgtgcagcacagatcacagctcattccatcctggcattacactggcctgtgccctgtcctcagggtcacatccgtctcccagaagccgtgcaaccctggaaaacccaggtctaacagtcaggttcctcctctgtgcattaacaatggcgttgacgtctgctttgcgggacgctgggaggggagagggaggtgtatgctggagagctccccaggggcaaggcctggttctgcgtcactcactgtcagatcctgagagcctggggctggcccagcacgtggccaccgttccctaagagttggatttcatccctcagtgctgaaggcaggggatagagcttagacagaccccctgcgtcctgtcttctttatctacagcttactcatccttgcccctttcacgtgcacccggcagagcaggtgttcactgagcttgagcaaaattcaagctagagcagctgatggatcctgaggcctagattcactgtcaaagtgtttctcaacggtgctctccagaacaccaaggaaaactcattgactgtataagtctgaaaatccctgcccaccggtctacctttgtgtatgagcaatcagctctaccattcagcccaggtgtgtgtttgctggaccatgtggaggaagctgaagagacatgagcagaaggcagagggtgagtccaaggtgggatcttgggacaggtacgagaagttaggcaaaaatgggataattctagccttcataaccttagataatagttcacattattatttagttaatagaattgtacccacattaaatttcttaaatttttttaagagataaagtctcactctgtcacccaggctggagtgcagtggtgcaatcatggctcactgcttcctggaactcgtgggctccagcaatcctcctgcctcagcctcctgactaggtgggactataggcacgcgccaccatgcctggctaatttctttgacttttctctagagaccgggtccacctaggtttcccaggctggtctcagacttctagactcaagtgaacctgaacctcccgccttgacctctcaaattgctgggattacaggtgtgagccaccacacccggcctaaatttcttatgtgccatgggactgcaaaacatcattattaggggcagctggatggaaggtataggacactatagtgccttttcaatatttctgtctaaaatctaaaatcatttcaacaggaaacatttatttcaaaacgtgaaggtggttatccttccatgagtttaaagtacaaaggcaggctcacggtgtcgtcagaattcagaacgatggtcgtggggctgggggtgttgggaggggctgggcatggttggctttgtgatctggggtctggtgtgctccatctctgaatgtctctcgagctgcactctttcttaatacattctcataagtttaacaaaaaataaaacgaggaggcgaagcttgcttgggttgttaagcctagggaaattatccagccatgagccctggcccagatgcttctagaagcctggagggaactgagaactttccaagtggaggccgcagaggcaaggtcctgaggtgggagcacactgctgttcgtccctagctctgaagggggtgccctggtcggaatcagtgctgggtgcactgcagggccgggaagtccatgcccacgttgtggctcagtgcagtgaaagccgatctcacccgctccgcagggtgttcagcctgccagcaggtggccggctggtcctcctgggatatggcacggacccagcagctctgtctgaaatcataacggcggaaccaagggtcccctacgtccaggtccgttgggaggcggggcatggagttccactgcaggaatctccaggaaccctgaggtcctccctgagccagggccgggctgggcacaccctgagtgcccacagggtaggtgtcttcccggacagccccaccaggacagggtgtggaagaacgaggtgcccgtggcggggaagctgaccaaatgggccatgggaaccgggctggtgggcctggaggggcctgcctgtcccccttgcagagggtcttcccgccccgtgaagccggcacaggcctggatgccgacgacccttgctcgggtttggctgaaaggaaaacagacgcggtcagcatctccagtgagcccacgcaggcctttccgggctgggccccacctgcctgcgtctctggagtcctcggggtctctgtgtggcccccgtggcctgacactgaggacacgcctgtagtctgctgatcccagagggaggagtgcgtgctgcctggcgtggggaagctgtcgtggcatggcgggtggctcctgggactgcccccagggttcagactggctggcggcttcctgccacacaccttcgtcccagggctgttgggcctgggatacggcccccagtcagaactcaggtgggaggggccttggatgtcacccagccccttgccacctcaggtggggacccctctccgcagtgggtgattgggcccggacgtgggtcaccctctgccctcctgggctgcccagtccatgccaggactgaccgttcccacttctggctgaacgcttggctctggccctgggcccggggtcccgcctgcgccctctccctgaaagctccgtgggtcagggacaccgattcccttgtctccctggctccaggctcgttgtcctggcaagcttggaggagcgtgcaggagtgaggggcctctgctgctctctgaggctgtgggtgcttgcagggaggggcggggtctcccacaaatgggtctgggctcggctagtaacttggagggccctgcgagggggagagggagacaccgcagaaagtgggagggggcttgttggagggtctcgcccacatccccctcctgcgtgcacagcatgtccagtatacacgcactgagcgcctgccctgaggaccggtgggcctcctgtactttcttagagtccaggaggaagaggaggaagaaaaggtgaagaggaaggcccaggtagtagggttgcgggtcccgggcactcccctactattgactaccccagagggtgacatgggaggggacatggcactggagcccacctgggggtggcaggtccccctgctttcttgttagtttcttcatagaggccctaagatgcttgagcacagtgtcatcatccctggcccaggcatcaacgaaccggttccaaaaacgtgcccacgggccacacctggacgtcttcgtgaggcgctctagggacagggtggatatcaggccaggggagttacctgggaatggtcacagctcataccccgtggccacttcagtctcccactgggcggtgccggatccttttgtggccaccccaggcgtccagatatacacaggagactgtggctggggggcgatctggacagggaagtgctcaccacactctcgactttcatctgggtcatgtgggggatgggctcagtgtcacagtgtcctgcccagcccacctggccagacctccctctgggccagaacagaggatcatgaggacagtgtgaggaagctgccctcgggccagtcggggtctgaccccagggctccccaggccccgctgggcacacgtagacttactctgctgaaccttaaaggcgattttgttatcggcatgaacgcctgttcgccttctaccagatacacgtcccagaggcgcagggtgagcccgagagagatctgtggggacagcaggtgtgaaagaacctggtccttccaggctggggctggtggctcgagctgcgcacactggggcttcagtctccagagtcagtgaccttccccatgagggtcgcctgagccctccaggacgctgggtcagacaaggtcttgaagctcctcatggggggcactcatttgagtggggatgtggctcctggagagaggggcttgcccagggcttgaggcttccctgagccctctcaagtcgggtcctggcccagtctgcccatgaggctgggcctgagccccagccattgccctgggatgacccctcttgggcagagggttttgcttgtgtgtcctttggggacccgcctgagcctcctgtgggctgggagtgagccagacccccgggctggggaagcagggcactgcagggcaaggagggtccctgagccagggtctccctatgcctccttaccccatcaatcaatatccggatgaggcagcctaaggacgaacactgcccacatagatctttcttgtcctgatggaagcaacagaggtgctcaggccactgggctgccctaaaaacctccctcttccagggcctctgaagacccttcccctaatgcagaacactgggcggtgtccagagctccccacaacactgtcaccttcccacactcccggtggacacgctgccctttgcgctgctctgcgggagctgggcccccatccctgtgcctctgtctcctccagggcaggaaaggaaaccaactcccagcccatggagaacccgacgtcccaggtcaggccctggctgggactcagccagtcaccagccccacgaggggctccagcccccctgctcctacagccccacgggaggcagggcctctgggaagagctgaggggaccataaactcacctaatgccacatggtcttgggtagtgacgtggctaccacatgctcctgttggtcttggagcccctggacggtcccgccatttgggctgtgaaatcctgagaagcccccagcccatcgtgaaatcagagccttccctcaagatgtggagccatcagctgcaagagctgggcagctggagaggcccccaaaccccaaggcctcccaccctcccatctggtgaccccaacatgcggcctttaccctggggaggtggggcgggaacattccctggagcctggctggaggttcccctggaggcctcctgggccagggtgcaaaaagggcaagcctgactttcaggccaccacagggcagccggaactgggtgggtgctgggcttcctggtcatctcctggtagtggggtcgggccagggaacaggggatggggagatgctgccacctgggcttggtcggcccattcgtgggcaccgatggcggcaggagcccgggcagctggagggcaggaggactctcagggaggggagagtcagctgcacagaatcagagccggagggcgtggctccaggacacagagggtggccacggggaggatgagatgccctctgctgatggggatgagaggcgtctgatttgggctttgggggtcagccgtggactcctgtgggaccctcagcagagacatcctaaagtctcccaacaagctggcgacacaaggagggtgccttggctaaaagctgtgatcacctggccagggtggccatccccaggtctggctgcaggaggtccccggggcagctgttcacttaccctgcagggagtgcctctcactggccagcagctgcaccagtgcccagaatgcatcctcctcaggaagataaaggaggaacaaggcggcgatgtggctcaggtccctgcagtagcccacctcctgcaagagccagagtcaccatggaaggacatcagctgggagggctgaggtcacctgggaggactcatgtcattggagagggcagaggtgactggagaggcttcctctgaaggagaggcttcctctgaaaaagaggcttcctcaggatgcacattcatttcatgacaagagccaagtccatcaggcacttcagcaccttgtccaaaatgtctgctgatagcaccatcctgtgtgcgatgctgccaagctcctgggctttggggcagccccaggaggagggcgtcatttcttgttctgagaagtggtggtcaggcccaggtgacaccaggagtccaggccctgactcctttgtgtatcagcttgaccccttgagaccacccccttccttggaggtttatgccagcggtgagctcacatcctacctcctatatcctggtgggtcacaaatactaattttaaaagaagcaacgacacccccaccagacacccactcctgtgaatatggaaatatggcccgggaacctcactgccgggaatactcaccgggttatactcctcatacgccaggaggatgtaaagtagttcccgctgcctaggaaacagagaaagggggctttggtttgttttgtgcagatgttgttaatttcactttgtctacaaagcctaacagcaaatcccatttcaggttcagatgattcaccagataagcagtgagctcttcagggcctgagactcttgaagaaatgtttcagtaaaatccacatctgtgacatgcaaatagcccagttgtacagtgacttgcctgatccttttcactctgaatgattttttttttttttcagtttgcacacacaccaattcggtctgtgggtgtacagttcctccacggttccaaaccaatgtgcagagtctcccggccaccgctccagcccctcctggggcgactccttcatcctccaagtctccagggtggcccctatgcacccagcctctccccgatccgtcagcccctggccacccagactgcttcccagtccctgtggtttggccttttccagaatggcctaggaatgggaatcctactgtggtagcttattgggtctggcttctgtccctcagcaaaatgcatctaggatccacccacgttcgtgcgggcatcactggctcgttcccttttctcactgggtcttccgtttgaagggaggaccagccttgctctacccattcccgtgttgaaggccgtccccgaaggctccgtgtgtgagtgacgaggagtcaagcagtgaacctggcatgcaggtttcatgtggatgtcagtttccaaatcagtgggttcaatctctgtgacactttggggatgcgtggttcaagtccatcgagctttgtgagccactgcccaactggctgccaacgtggctgtgccatgtcatgttcccagcagacctggatgagagtttccaggacccctaattctcccagcatttggtgctgtcactgttgcctgggggggctcatgggccctctatcctgccactctcccgtggctcctaccatgggtccccatgggtcagggagagcacctttcaccattgtgcatgattttgtttgctgccttccatctcctcaggatcctcctgggttctggccccacatgttccagtctggcccagggtttggaaccagggaggtgctcggttcatggtgccggctgctccctgggccaggagagctcttggcagctgtgtcatccctcctgggtgaccctggcttctgttccggggaagcccccatccctctcattcaccccatctctgctgggaccctgtggctcccgtaggcttacttggttccgtatcgatccctgaagaatatatgcctccttaatgtcccgcttacgtccaggtccatctgctggatgtgttcagatgacctcttgcccttctccttcatgatctgtagggcagggccaagaggaggaagcagtctcagaacagatggaagactccctgcccccagtggcagtcagcccacagtcagcacttcgggaaggaaggacagaaggaaggtttccttctgcagaaagctgcattttggcttgttactgaagccagggagggtcaccagagctgagtttgtctgtggtgactgtgtcaccatctgtgcccagggtgttcaactgaccttcacccccagctccccagggtggtcttgacgttccctccagctggagacctgggcccctgacacggcctgtcctgttggttgtgctctggctgagtgtacctggtatcttccggggtttttcaacttgatttcctcaatgttcaggaggactgaccacatcgggccccggatgttcatgggaattccctggtacgctcgatctatgagctgtgggcagaaaacaatctggtgtcgcaggccacggggtgaccccagtgaggaccagagcccggggattctggaaattgttggttttggccccgtgattcctcagtagaggtgagatcaagctgggacagggtctcccttcccaggactgaaagagtggatggacactcagagtcgaaactctgatctgaaccttttccttccttcaggtcaccagggcatccctagccttgagctccgggtagtcccagccctagattcagattccctcccagcaaggtgacgcttgcacgagtaggcaggaaatctggcgaccaggcctgcagtcctctgggcgaggacagcgtgccacccaccctctgagaggctgacggcgccaggccacagccatgggtgcctgtcccctgtctctgcagagagtgcttcctccctccacacattacctttctgctgtttttgtaggtgtcccattctcccagcattttcacccacttgctctttcggctgatctcccgccgaatttgctgtcaaatgaggcatgttggagttagcagagctgccaggcttcccagagccgcccgcggatgctgggtcttgggctctggagccctggtgggagccagctggaaggagccagggaagggcagacctcaagggctgagagcctttgagcaaatgagcaccagtgggctggctttgggaccccgggatgtaccatcctcaggccacagccacaccagtcttaggtcccagcctctaggtggggtcctgacacaagcgcgcagccacccccaagccaggactgtggttctccttttggaattttatcaaactgccaaagttaacagcaacctggggtcaggtccagcagggactgctgcccctcccagtgacagcgcgttgccctctcccgccaccgctcaggccagctgcttcctctgcctcactgaccacccgcccagtccctacgtccctggaccagcccctccatgcatcaggctcttaccttcacctcccgcgcagtcagaggaggcagctccgtctcactgtaaggcaacccaggcagagctgaggaactgcacggggcctggagcggccccagcctgggtgccgacccccagaaaggactggctctgtccctttccagctcagggctcagcccaggagaaggcacagggaagggaggacaagggccttcctgtggggctgactcccaggaggggcaggacctgggcgaagaaggagtgtagggacagcctggccggggttactggggcccctggcgtggggggcggtcaggctgcccagtggggctgcccgtcctggactcgaggtggtgctttctgctggagctgagaaaggttagccctgagatgggatgggggccgcccagggtgggtgaccgggccctgacaggagtccctcagggagtgaccacatcaccccgccagggtcaagggagcctgccctgagacctgccccgtgtactctgggtgcaccaggggcccatcccacttgacagccccaaggcccttgcaggttctgacctcccagcatccacctgcctctccctgctcccgagccacacaccctgcgtttcagaagtggcacggctcatcagctccctcccaccctacctcccccgggatcctctgtctctccatcctgtgatccctgagggatgggctcctggctgggctcctcttaccaggccccagatcccttcccagcaccagacccaggtctttagccgcgagccctgctgcctccccggcctcaccgtgagatgcccagagcggggccctgcccatcttccccccgttctcctagggctacagcccccattgtcaccatgccttttcccctcacgggacagtgagggctgtagctctaggggcatgggggagaacaggggcaggtgggccctcagagacctgctggacaacagccctgaggctgggccaggcgtcccctcaccctgtggccataacccttggatctcaccggggttgtctccaagtagacagggccagaccctcaggctgccccgctcctcttgtgctcacttgccgacagaactgctgagcgcccaggggcctgacctagcccagtctccattcccaccggctccctagatgggccccacacctctggcctaacaacaacctcgggctggacctgcaggggagtcagggaggagttctgtccctggaaaggaggttgacccgacctggtgagacatgtcctgcatcagaaaggcctttctaaaagcaaacccatccctgagctgagacaggtgctttaggggtgaggggagtgcagaggactcactgctgcatcccaaagtgatcgatgttgttgttgtagcttccaaaaggcttaggccccttgtcctctggcagcccagctcggtgtccctgtagcccagagggagccttggtgaggggtccaaggtaaagggtgcaagggcctgggggcattggtcacccgtccctgccctgtgctcctagcgagcccaggaccctttgaccagggcacactggaagaggcctccctccaagaagcagaccgacttgtaccttttcgtatttcataatgatgtcctctcgctcttgtgcccaccaactacccgcgacctctaccacgtccatcctatgagacaaaattgtctaaaggttacactgtacgcggcggctttggagaacacctgaaccgctctcgccgggctcccagatgctggctggctgcgtaacccccattccaccgccgcccccagggaaaaaggggccagacccagtggcccacagctgctcgagtctctggagtctcaagtcccaagcaggggtgggcatcttcccaaggacttgagtacagtgggacctagacagagaatcctgttgtcccccagtgccatgaaatggggacacaccggccccagcaggttgaatggtttccacctgccaagggtgaagggcccatgatgggctattccagggatgtggaggcagactggggtcagcgaccagaggtctctgtacaatcggcctcctgggatgctcagggcctcagagatgcccagtttcctacagggaacaagatctctcctgactgctcggttctactccgctgatcactttggctaccgtggctcttcagtctgaacagtgaagccactttaggaataacgcctgttgagcaggagggtgttcggtttgggggatgagaaagatctattgtacgcatggaaaccatgtctctcgcggagggactgtggagtccaccattctgagccgtcccaacaggaggaggcttcattttcttgggtcactgaggaagaacagtgggtccttggtcctggagaacacctggatggactgtccctcctgggaatactcgaggcaaaaggagggcgaggcctcaagaggaccacacagagcaagaaatgcctggggagaaccctagtgcccggacccctttgaacagaagggaagatagtctcccctcagccagccctccagggctccttcattttccacggctgcccaagggcagcaggctcccccggacaagggaccatgtgtgttcagtggggcccacagcgaccatcgggacccagcttagggcacagaggtgttctgaggaccgtcagtggatctataccagtggatctataccagtggctctgccaggaccaggctctgccccatcgggatcggaaacctgggcagatttgggatctagggcagggaggtcacagggttcaggcctgaattccagcacagcacacagcagggctgagagcaaaactcagggtcatgtccggattcccaggccggttactgcctctctgaccccagatgtctcatctgtcgaatggggacatttgggaacagcacccactctacgaagccaccatggagacgaaagagccaatcgtctacacgggcagtgtagaacgggcgcctggtgagtgctcagggatgaccctcctcagtagctgccccacagaggccaacaccgcccgcaccgtggccactgtccccaggtccgcctggagggaagagagcaggtcacgctcacctgattctgatgaatcagctggcctgggtcatgcctctcagggagaaaacctttgagtccacagagctgctcacagataccactgcctgtgtgtaactgctgtagaacactgaggcaggccagagagcggataggtgctaagcaccagtgacattctgaggtcatggcacgcatcacaatggggccttgcccgggtcagcagtgcccagagtcagggtcctccgctgcctgaggcgtcaacatgcctgcctgcaatgtgtttgtgcatgtgcgtgcacatgtgtatgtgggtaaacacatctgtgcacgtgtgtgttgcttctctggccaggcccggctgccccactcatgtgtgcacccagttcctcatcactgtcacccccgaggcccagggccagcatcagagcatccatggctgctccctaacctcagccctccctgcccagggtggtcctgggatacacataggggtggagggaagtgactgctgctgctggatctcagaatacaaaagctaatactattacctaatggtctttttagtgtctctaatggtatcgctttttcatttctgatattttaactgggtatttctctccatgacccttggatattctagctagaggatcttgtgaggaaagtgccgggcacacagtaggggctcactcttctagacatgttatctaaaacctggttcatctgtccttccacgcagggcctaggggatgccaaattccagggtccagaaagagcttgggataaaatgaaacttcaaggggacggctttgacctgggctgagtctgcctgtgccgagtctgcctgtgccatccaactggagtctcaagtcctgaggcagtacgtccagatgccccagtgcagggtcctcctgatcaacacctgctcccctgtactcattagcaacctcacccaccctactctcaaagcacacttggctctcatatccaggagctctgcatctgtggattcagcaacagcagatggaaaatattcagaaaataaattggacggttatgtttctattgaattgctcttgtcattattccctaaagaatacagtatcacgaccatttatgtagcatctgcattgtattacacatcctgaataatctagagatggtctaatgtctacaggaggatgtgcatagctgatatgtaaatactaggccatgttatgtcagagacttgaggatccatggattttggcatccccggggaccctagaactaatccatggataccaagggatgactgtagaaactcactcaggaaggcttctcattggaggaagggcccagttcaggacacacagggacatctccctggactactgtccattcatccatccattcatccattgtctccccccactcccccatctcggactgtcccaatgacagccctagcaagaagagacaagaaacaagataagttcacattgtccatttttgaggtattagaagaagttgcaccggtatgagaatagtgggtcagttttctacaggatccagaaagcatatcgggcagcctcggggtgcggaaaggagcctggcctctccagcagccacacaggcctgcagtaggatggggctggtgctggccatgtggatcacttgggcctcatgaggggaaaggaaataccagggggcagaagaggagcatgggggcagctggttgcctaaggggaaggcacctcagggaaggggactgtattcatttgttttcacactgatgtaaagaaatacctgagattgggtaatttataaaggaaacaggcttaattgacttgcagttctggaaacttacaatcatggcagaaggggaaggggaagcaggcaccttcttcacaagacggcaggagggagtgagtggagaaccagtaagtgccacactttgaaactatcagctctcctgagaactacctcactatccggggagcagcacgggggaaactgtccccaaatccaatcccctcccaccagattcctcccttgacacaggaggattacaatcccagatgagttttgggtggggacacagagccaaacatgtgagggtctcagtctatgttgcagctcccctggggctgaggcctcctcccagccgccccttcccccagggcttcccaccttccctgccctgaattctctttttttttttgagcttagtgatagacaaagttaacatagaaatcttggcctgcccaccaggtgtggtggctcacacctgtaaaccactgcactccagcctgggcaacaagagtgaaactccattgcaaaaaaaaaaaaagtacatttcaaataattatcacaaagcaactagctttccattatcactgagtttaagaaacagaatatagcgagcactcaaaagcctcccatttgcttcctccaaatcacaaattctcccttcttcacaaaggtaactattattctaaatgttacagtaatcactttcttgcttttctttacagttttatatcctatgcacaagtaaataaacactagatttcattttccctgttttaaaagtttttatatttataaatagaattacttaattcatttttgtttgttttttgttttttgaaacagggtctagctctgtcatccaggctggagcgtagtggtgtgatctcagctcactgcaacctccaccttctgggcttgagagattctcttgcctcagcctcccgagtagctgggactacaggtgtgtggcaccacgctggctaatttctgtattttctgtagagatggggtttcaccatgttgcccaggctggtcttaaactgctgggctcaagcaatcggcccacctcagcctcccaaaatgctgagattacaggtgtgagccaccgtgcctagcctaattcttttgtgtctggcttctttccatcaacattaggtttacgagattcatttatactcgatataactacaaatccattcattttcattcctgtataatgttccattatcttaatatatctcaacttcccaatcccttctacaactaatggacatgtaatgttttcattttggggctactatagataatggtgctacaaatattcttgtacatatctcctagtacacatatctcttgggtggatacctacaggtagaactgcttatccttaactagaaaattgtattccaaagtagttgtattaatttattttctcatcagcatggtatgagagttcctgttgctctacttagcaaccctgtcagtctgtttaattttacctgttcaggtgagtgcactgatatcctaatattgttttaatttacatttcactgattactagtgtcgttaatcacttttttttttttttgagacggagtctcgctctgttgcccaggctggaaatgcaatggcataatctcggcccactgcaacctctgcctctgggattcaagtgattctcctgcctcagcctcccgagtagctgggactacatgtgcccaccatcacgcccagttaatttttgtatttttagtagagacggagtttcaccatattggccaggctggtcttgaactcctgaccttgtgatccatccgtctcggcctctcaaagtgctgggattataggcgtgagccaccgcacccagccaagttatcaattttaatgaagtccaatttaatcttttcttttatatgagtagcctcaggaatgtatttaccagtattatcttccaagggctgtttcattgttttgctttcaaatttagctctatagaacacctggaattgtggtgaaaggtaggtgccaagtttcatatggatatctaattgtcccagcaccacttgctgagaaaactatctttctctcacctctctgcaatgttatctttgttataaatcaggtgttcatacatttgtgaactggtttctgggctctctcttctatcccaatggtctacttgtcttttcttgtaccaatatgacattattttaaatatcatatctttgtgaaataaatcttgatatctggatgatatccaatcttgatgatatcctcatatcttattcttcttcaagagtatcttggttattcctggtgctttgtatttccacatatgagaatcagcttatcaaatcacacaccacacacaaacacacacacacacacacacacacacacacacacacacacacatgcagactttgcatttttattgggattgtgcattaagtcatctgtaaattagtttgtagagaaccgatatcttaaaatattgagtcttctaatccatgaacatggtttattccttccaatatttaagtcttctttaatttctatcaatattttattttctatatagatgtcttatgtgtcatttttaaagtttattcctaggtacttaattttttctcagcatttaatttttttgatactaagataaataatatctgtagttgagttgaatggtggcctctaaaacagtatatccatatatccatgttctaacccctggaaccagtaaatgtgacctaatttggtaaaaggatgtttgtagatgtaattaagttgaggatgtcaagatgagatcatcctggattatctgggtgggccctaaattcaataagtatccttatcagagaaagacagagagaaagagaaggctatatgaagaggcagggattgcagttatgcagtcacaagccaaagaatgcctggagccaccagaggttagaagagacaagaaagcattctctcctagaacctttggaggaagcccccaccctacagaaaccttagtttcagacttctggcctccagaaggtgaaagaataaatttctgggccgggtgcagtggctcatacctgtaaacccagcactttgggaggccgaggcaggcagatcacgaggtcagatcaagaccatcctggccaacatggtgaaaccccatctctactaaaaatacaaaaattagccaggcatggcggcgtgcacctgtagtatcagctacttgggaggctgaggcaggagaattgcttgaacccaggaggcggaggctgcagtgagtggagatcgcgccactgcactccagcctgggcgacagaccgagaccgtcaaaaaaaaaaaaaaaaaaaaaaagaatatatttctgttgtttaaagccaccaaatttatggtaatttgttataacagtcctaggaaaccaatacagtaccttttttacaatttcattttctcttgttgctgctatacaatcaatttacttgatctagaagccctgctttcctttattttatttatttatttatttaagacggagttttgctcgtcgcccaggctggagtgcaatggcacgatcttgcctcatggcaacctccgcctcccaggttcaagtgattctcctgcctcagcctcctgagtagctaggactaccggcgtgtgccaccatgcctggctgattgttgtatttttaatagagacggggtttcaccatcttggccaggctggtctcgaacttctgacctcatgatccacccgcctcggcctcccaaagtgctgggattacaggcgtgagccactgtgcccggcctttcctttactttataaaattaggacactaaagtccaaagagctcaatcagctatctagtggcagaattagaactaaaacataggttgctaaattcctagttcagtgccctttctactctaccaagttgccactatacccgaagactacctctttaacaattatccactgaccacagttttcaaaccttcctttttcttttttaccaaagagtcaacctttaatgcaatagttatatattagactatcaagagaggaattacgcacaacttgattttcctcaagaacattcttgtatcctctaagaaaaaaaacaaaacaaaacaaaaaaaccaaccccaaaacaaaaaacttttccgaagccatccgcatttatgtggcagtgaagatatacatacctacacaaacacacaggaaacataaattttgtgtgtgttggtttttgtttttttctaatttttttagagacaaggtctcacttattgcccaggttggagtggagtggttatttacaggtgtgagcatcatagcatattatagcttcaaaatcctgtcctcaagggatcttcctaaacatgcctggcttaggagatacttttttttttttttttttgagacaaagtctcactttatcacccaggctggagtgctgtggcgcaatcttcactcactgcaacctctgcctcctgggttcaagcaattctcctgcctcagcatctcaagtagctgaaactgcaggtgcatgccaccatgcccagctaatttttttatttttagtagagatggggtttcatcacgttggccaggctgttctcaaactcctgacttcaggtgatccccctgcttcagcctcccaaagtgctgggagtacaggtgtgagccaccgcacctgaccattttctttcttttttttctttttcttttctttttgagacagggtcttgcccaggctggaatgcatggagcaagcaagcatggctcactgcagctttgacctcctagtctcaagtgatcctcctgcctcagcctccagagtagttgagactataggcacacaccatcatggctgcttagttaaaaaaaaaaaaaagtctttttttttttttggaatagacgaggtctcactatgttgcccaggctagccttgaactcctgagctaaggtgatcctcctgcttcagcctcccaaagtgttgggattacaggtgtgagccactgcacccggccaggagacacaaatttttaaagaaagtagtactcagatgcactgtctatcctgttgcctcttaatatacggataaggaatgtcatttcatacattagccaccatgagtaatactaaatcctggctctgatcacttatattagcatatataatacattgaaaatgcattcacagcaacagattttgaggacagggtaaaaaagtaaaaaaataaaatttgtaaaattattaaattttaaaaaattaaagaaaagaagagaagaaaatgcattcaatgatgttgcaaagacagcaaatgactatttcacaaatgacactagcaagactggcagtgagttgcctaacatttaactaaccatttttcggtggactgcaatgatgtaacctgtaaaggggctgtcaggaagagatggcatgtgaccattaaccattccatttgtgaagttcttctcagttccacatggcacaacagtgtttggcattccattggggatgaatattggtcggggtaggtccccattggtagtaaggatgaacattccatttgtagatggtgaagaggagcaatctacaaattcaaagataagtacagcatcataagcttgtggtattttcatctttgctcttttctcaagtatcctgaggaccagagacagtgtagtctcttaacacagggcagggagaaatcacagtataaataattatagatttattggaagattttaattttccagttttacttccctaactcacacttttgaccaaatgaaaaggaaagagtaactgctggaaactattaagcagaatttttgcagaaacctgtatcggcaccatgttgtagcacacaaacagttctaccacttgttttcttttccttctcttcgcctttgaagacactgtttaatacagtaacctctacccagatgttgcatttaaaatttaaattaggctggatgaggcagctcacatttgtaatcctagcactttgggaggctgaggtagcagatcccttgaacccaggagctagtgaccagcctaggcaacatggtgaaaacccatctctacaaaagatacaccatagctgggcatggtggtacacgtttgtagtcccagctacttgggaagctgaggtgggaggattgcttcagcccataaggcagaggctgcagtgagccaagatgatgccactgcactccaggctgggtgacagagtgagaccgtttctcaaaataaataaattaaattaaataaaaattaaaaatgcattattctcactcacactaaccacatctcgagcgcttaacagtccacgtgactggtggatactgtattggatggcaaagatcacagaagtttccaccactgcagaattctattggacagtgatgctctaaactaaaactaaaattagaacatccaccaactcaccgtcaggactatctacctactacacatcaatgaggggagcctcataaagccctttatagttggggaattagcctaattaacctaattgtaagtaatataaagaatagacaaagcatactagtggctaaaaggactcagtgagtgaccacattaaattacatataatattggatttctttctagctatatctattgtttatattttctggtagtatgttcctctcatactagctgttgccatgttagtattagatacaagttcaaagagatctgaattccaagggtatattagctaacgactacctatctaactgaagtcacttgggttctctaaattttaggtttctcgtcgaaaaaatatggaataatcagtaaggtttcccttgggttccaaaattcttccgctataatatcctcagcatgaacaaatataaaaaagatgacaactcttagacaaatatttaaaggagcaatcatgagaaggagttctagttctatcttacctgtctgtgttggactagaagctgaaattggagacgcagggacaggaatttcaaatgcacacaaaaatccactcactgagagtcgtactttttggttgtcctgaggaaagttctacagaaacagaagcaagatgagaagggggagatgtttcagataaaatggaaaagttctctctctaacatatttcaaaagaatgtcttaggcgctttcattcttaaaaccaacgagatgattgaataatttttcaactacataaaggatgaatgcttgataaaaataacagaaaactaacctcaattttcgaactattatctcttttcacaggaagaagtgtgttatatatgactgacttcagttttgtccgtttcagggatctaaattccaaccctcagagactccatttttgcatttcatattaagaaactgtcaatgaggtgagagtgtgttcagaaatcccaaagatgaatataaataataccagttgcaggagcttaatttagagtaggcaatatatttattagattatttgtttccccagctggtatgtagaaagacatgattggtgtcaatttgtctttactcttaatttcttagtgtgttaaaagaccaagtatatatattcataaatactaaaaacacacattcataaatacataaaatactttaacctaggaagaattctagtaacagcggtaatacagaagagttgtcaagggttaatagcagcagtctttggtaacagcagcagtctttggtggaaacctatactatagtgacacagctagaacactccatataggcagccttacatatttcccttcttcaaaaataccaccatcagtattatccctttattctggtagaaaactcttaggtttctgggttggaaaacttggcgttttttgttgttgttgttgttcagttttcgttatgttttagtatctctcttggtcacagaacctaacaattgatcataataattgagaaaaatgtcatctttgaaggatagaatcaaaagtttcttagagtagttaatattacctttatgttggaaccatgtacttctgctagaaggatttgttctgaattaagtccacagagatcactcagctgtttttttaaacctgtgtacttttcatccatattcagtcttagtccataccgtacaggggtagtaccatctaacttaatcactagtaaagagaaaagatcttttatcggtaaaatgcaggtttcattgaaagtcttaaatgctgtgtacagatatatctgacctgtaaatataatagcaaatatttcagcctagaatttttattttatgtgtaaacactaaaacagatggtacttagggataatattaagtgaaatcagtatttttttggtgttcatctgacataaaagtatcagtggctttgcaggattttaaagagagttgctggcatatttgaaaccaaaaaaacatgccccaatctacatctttcaaacctcaagtcatgcctaaaattaggttgctcgattataatatgctgactaccggtctttatttgtaagcaaataactacgcttacaaactcaggctatttaaataaagtaaatttaatggagtcaagtaatttttcagaactttctgacctacctgttatttctaagtgcatataactgtccattggtagtggcaaagacaaaaaattgaaagggtcaaatcggacacttatatgcccacatgtcttgcattttacttgagatcttagctgcccatggaacaaatccacaacaattgatctatttcttcttagatggttgtctcaggcctagcaataaaaaagatgagaattttctctcaaaatccaaaagagaggcatttctatataaattcaaagaaactagttaaatatattggatttaaatgtaaagaatataatccttactcttcatttaacataaaatattaaattgagatggaaaatcctatttttcatttgttcttattaaggtaacaatggtaaatattaaagttatttgtccattaacaagtataaagcatgcctataggtcactgtatccattactttagcaattatggggactctttaaattccactggataattattcctacatccagtcccataaagtttacaatatgaaatggcaacagttttctattttcattaaacgtatttttgttttggcattactgcataagaattaagcacagaaatagaaattcattcatttttgcagtaaagttctgatctcagaatagttgagtttgcatttaagttgtgctacatgtatttgtggccagaacattttgtctattgcttacattagaaactcaaaactgacaaacctctgcagctacttcccagtctggtcgcccatcactgtccttcagttccacatatggcttttcatggactcgattaagatcttcatgaagaccatccaagagaaaagccagaagttcttgggcgtcttgttgctgaaacccgttaaacctgggagcatattttgctatggtccactataaatataagagaagtcacagtcattatttcctacccataaaatttggaatgaacatgtcctataatccaatcagagccattgtaagaaaataaatagtatagtacttagtctgcctctatttcaacaaatatattttggataatcatgaaatcttttgaatcttaatgtcaaatgaccgccccctccaaaaaagagaagtattttggccaatactgtgcaatactgtgtcctcagttcagtatcatgtaagcaaactgttcttcaggcacacagatgttatttaagacagaaatattaaaacagcatttgctcacattgaaagacatcctgttctataacgttttacatttttatatgcatataaaatatgtatattttataggtacatagtatatacataacatatgcataaaataatgtgtatataataatacataacatgtataaaataatatgtgtatatagtattttatataatataatgttgtcttcaacaattacattttctggtcttgttgcatcctaacttttattaactgcattatattatagaattattttgaggatataaattaattagaatagtgcctggcaagaggtaagtagtcaaatgtgtagctgttatagttaataatttgtaatataaaaagcttttgctttgtatttaaataaaaataatgaataatcctaacttcactaaaatctactacatctaatattaatataaaacttatattcattagtttcattcattcatccttctacttttttttttctttttggagacagagtctcactctgttgcccaggctggagtacagtggtgcgatcttggctcattgcaaacaccacctcccaggttcaagcatttctcatgcctcagcctcccaagtagctgggattacaagcatgcaccactatgcccggctaattttttttagtagagacagggtttcgccatgttgtccaggctggtcttgaactcctggcctcaagtgatccacccacctcagcctcccaaagtgctgagattacaggcgtgagcccctgcgcccagcctacttctttgtattctacagatagaactatcttagttatgttgaaaatggattggattggatgtaattaataagactctgaggtccaccttgcagttagaatactgctaatagtggagtattaccaaaaaaggtttactcttcatataagatgtttgacaaattagtaaaatgaatgacatcccgagtgtacctttggtcttttagagtgtacctttggtctttatcctacccactacatatacagtagtattttgcatatatttaaacaagcaaaagaatttgaccttttgtttataccaagtgaaggatccaaaaacatttattaagctaaaaggctaaacacaaaaaacaagtagagaaaaatgattaaacaactattaggaattaaatacttttatattattttaacctgcttacccgaagctttaatggggcaacattcttctgagttccactccaaagttcctgcactaaatcaccatagcatttagccatatgccccttcataccaatgggatttgtcctagaagtctgagaggaaaatttgttgccaaagattctcataaatcacaatcatgtgggtgcaaaaatgcctagcatctcacatcaaaatatcttttctttttgaaacaagagatgtattccttggcctatttcatattaaatagggcaaataagataaaatctttctcccacagggtaaaaaaagaggaaatttaggtgatattgggtttatatcaaagtcacaggttaagaggccactgactccagaaagattacctgttgagttcataaagatgtctccctgagataaaatactgtgtcagtggctgtgtgttactaacacactggatgcttgagttcatgaagcatgtgtttcccaggttgcttagacctgtggctcccttttctgtgagaactggtatgagaaccaaagcttagctgtagtaatatgccatggcacaaacagttacttatattcaatgaaaaggttttttataactctcataatcagctaaatggtgctaataattctctagcaggtctttgaaatgctagagaaggcttttcatggagtgtctggcaacagtgatgatccatgctcatttgtaacccagaagcagcaattattctttttaattgctatgatttttcaaaataattcaaacaattcttcttctagtatgtcttttaaaacatataaattatttaattgcagagttagaaagaaatttagaaaataatttgatggtgggtttgccaacatcaaatgctgcttcaggaaaaaagaaaaagaagaaggccctaattacttttgaactagaaaaccaaaagttgttagcactttaatagttgagagaagaaaaaaaaaagaatacatttaaaataatctctttaaaaaataatactgcagacttacccttgtgtctatctattttactactatttgatataaaagacatctcctcaggccaactcatatctttgttgcgaactggaaggacagatacgaatgtgttaatttcttatctatctaatttacacccattcgattgctttttttttttttaaagacatcttattcctaaatcagaagttttaaaatctagttaattttagtatatgcaccgcttaacgacgaggttatattctgagaaatgcatcattaggtgattttgtctttgtgtgaacatcacagagtgtacctacacaaacctaggctatgtatggtataggctgtctctccttggctacaaacctgtacagtatgttactgtattgaatactgtaggcaagtgtaacacaatggtaagtatttgtgtatctaaacatgtcagaacatagaaaaggcacaactaaaaatacagtattataatcttatgggaccactgctgtatacaggtcttttgttgacaaacatctttttgcagcacatgcctgtaattggctctaaaaccattcctactcttcatattgaggactttaaagtcacttggtttgaataatcttatccctcaattacctacttgaagtaaaattatactcaaccatctacagaagtaattaaagttcagaaacaatggaatttcttatacttaaaacattagaaattacaattctttcttaaattgtaacaactgtcagagtaatttattccttttttttttttttttgagacagtctggctttgtcccccaggttggagtgcagtgatgtgatcttgagtcgctgcaacctccgcctcctgggcttgactgattctggtgcctcagcttcctgagtagctgggactacaggcacgtgccaccacacccagctaatttttgtatttttagcagagacagatttcaccatgttggccaggctggtctggaactcctgacctcaagtgatccacccatctcagcctcccaaagtgctgggattacaggcgtgagccactgcgcccggcctattcattttaatacaaaggcagctaacaacgttgccacaaaacttgatgggaaaagatacacttaaaaagtttttaatggaatgtgcatgccagtgtgtaaatctatgaatatacaggtagctctgtcagtgagtagccaatgttggtgactaatgaaagcctgtgctactaactatgcaagaaagttgttctttttactcaaactcaaagcagcaacttgaaaattttaaggaactataaatgtgtaaactgaattcacttgttttttatctaccattcccatcctttgtcagtcaatgactaaaaacagaatattttccctttaaagcaatctaaattgtatggtaggattacataagagttcaaagggttttctttttcttttttttccaaagggtttctttatcataaaaacataataatcaaataatagttgttttggagaaaattataaaatgggttattagtaactctttaaattcttccccttgaaaatttaatatagatgcatgcttccatcttgtaccttcaattaccaggtgttgttcatcctggattttcaaatattccaatttatgatcctcatcatccagaagagtaaggtagttctgtgtaaggaggaggaaatgtttttgttatttggttagtaaacttgaaacaaatacagagataaaaatgagtaacaattaaaaaaaaacttctttgtagttatataacatatcacaaatatctggcctactatagttgttcataaatatttataacttaggtggcagtatgagagaaagacaatgtgtgcttcataagcgttatctttctcttttttaaaatttcaataggtttttggggaacaggtggtgtttggttacatgaataaatttttttttttttttttaaagatggagtctggctctgttgcccaggctggagtatagtggcactatctcggctcactgcaacctccgcctctgggttcaagcaattctcctgcctcagccttctgagtagctgggactacaggctcacaccgccacacccagctaatttttgtatttttagtagagacagggtttcaccacgttggccaggctggtctcaaactcctgacctctggtgctccagccacctcagcctcccaaagtgatgggattacaggcgtgagccactgtgctcggccacaccattagtttataatgtaacatataatctttgtaactgtaatctttatatgtaacaataatctttgaaagatagtactgtccatggtgatcaattgctattatggatctcagagacaaatattacaagtatacatatagtaacttaaaagatgaacttttcactgatatcctagacatggcttttagcataattactataggtaaaatcccatactcatgaaatatgatttaacacttaattagccttgtgctctttggcaacatatgtactaaaattggaacaatacaaagaagtttagcaaatttcttttactatttaaaattaaacaaataccaacaatcagactctccatgactctgagatgcctcttacctcactgttgtatagccacaggcgcatatcttcctctttaatgcgcagcctttgagatagatattcgtgaatttccttgatggtctgcattcgactaaaacagcctgtataggctaatacccgctttaaaggtgcattcggagaaggtacatttcctatggttacagtaatcacagtaggaaaaaaggcagatgtgaaaaagaagcacccctctcagcaatggggaccatactattttaggaaataataatgagaaatgagaattacaggtgtaataattttataaatgaagagtaccaaaaagctttaaaatgcaggcaggagacccaagttctttttgttggtttgtttgtttttaatacatggagtcttgttatgttgccaggctagagtgcggtgctgtgattttggctcactgcagcctccacctccagggctcaagcaatcctcccacctcagcctcctgagtagctggtactacaggcgcacgccaccacatctggctaatttttgtacatttttgggtagagacagggtcttggccatgttgccctggctggtctctaactcccgggctcaagcgatccacctgcctcggcttcccaaagtgctgggattacaggtgtgagccaccaagcccagccttccaggtgttttaaagtgagtccaaagcctcaactttgaaaagatgagcaaaggcccaaggcccaaggtccaaattattggcaatatttggataccaagaagagtaggaacatgccagaaaacaattggcattgatatctggctgcactcagctgagtcacagtcaatagcaaaatgaaataaaactcagtggaaaaaaaattaagacagagttaaaaaaaaaaaacaaaactcagtggaggagataaaatgagatgggatttgaatcccacagatagataattggattcacctggtccactttcctaaactttctttgaatcactaatcccatcactttcagtcattaagtagctcaattatctgacacagtggtacaactgcaccagaaaacatatgtatatctattacatatcaattaaaaaaaaagagaatttgacataaaattctaaataggtatagactctacatagccaaacagagttttttattatcattatttgagataaggtctcattctgttgctcaggctgtagtgcggtgcggcaatcatggctcactgcagcctcaacctccctcattcaagtgatcctcgcactttagcttcccaagtagagacagggtctctctatgttgcccaggctggttttgaactccagggctcagggaatcctcccaccttggccccccaaagttctgggattacaaactgagattacaagtgtgtgagctaccacatctggtcaaaacagagtttcaaattgaagccaagaagtttcccatggccaaataaacaagtgcccaataaggaaaaaaaaaaaatcgtattagcctgtccacccagtaagttgacgacagacatgaccttgaattcctgaagggctaaaggtagaaacaagaagagtggtaatacaggggaaaagagtaaagagtgaaggaagaatatatcaagtctcactacatacttcaaaagaggaggggtatgaaatgacaagagattatggaaatcaaagagaggtggcaaaaaaaaaaaaacatcattaaaccctggttaactattccgccaaaaatctagacaaaactgtggcttaaaatagtcttctctgctgaggctgtattttattgagcaacccaacttaaaaatataaacttatcaatataatgtacattccaaataattttctacccattcaatcatgagttagcttctttcttcctgaaacatgcttttaatgagtcttccccactaaataaagctgagaaaatatgtgcatcatctacttttttagaacttcagaaaaggaattccctcacctaaggcaggctaaaaatcacctaaaaaacaatgacttctatagccttgtctgtagaaaagcctacatttaagtaattgtaactgtaagaaggtttgaatacttgtcacttcaaaaggaataaaagagcctagtaaacagctgtaataaattgagtatttgagaaagatgaacatcatgttatggcagaacaaaacccaacccgtgatcagtttttaaacacatagcaagcaaatcttttacaatcagcaagcaaaggataatctctaaaagaaaacaaaagagcaaatttctccaattatacattttaggattagttgtaagattacagcaagaaagcatatttttataaattttaaaatgattaatgattgatttcacaactaattagcaaggaataaaatttcaaattaaaaccaaatttggagcatctgaaatatgcagttctaggattcagaagcatataagtatagtattcaagtcaatctctattgtcctaagccacaatatgaaaatttgagtttcagaaagtttttatagcatagctcattaagcaggtagccacttactatacatactcttgtgcttttgaatagcaccaacaaatctagtggaatttatagaagcagcaaaaatctaggatcagcacaagagttacaaagaatacctactaaaagtgcaacaacacatcttgcctctcatgttatctttcttttatatatttttttgagacagagtctcgctctgttgcccaggctagagtgcatggcgcaatctcggctcactgcaacctctgcctcctgagttcaagcagttctcatgcctcaccctcccgagtagctgggattacagacacctgccaccacacatggctaatttttgtatttttaataaagatggggtttcgccatgttgaccaggttggtctcgaactcctgacctctggtgattcagcagcctcggcctcccaaagtgctgggattacaggcatgagtcactgcacctggcctcatgttatctttcaaagagaattgaaaaagttgtaatgggtgccatggaagcaaggctaatccttctaatggaaaattaaatcaagaatgtttcataaaggttctatctcactgttccttttttaaaaaatggtttccttcactttttatttttttttaagagacaagctcttgctctgttacccaggctggagtatggtggcacaatcatagctcaccacagccttgaactcctgggcttaagagatcttcccacctcagcctcttgagtagctgagactacagggcacaccactttgcccagctaatttaaacaattttttgtagagacaggatcttactatgttgcccaggctggtctcaaactcctggcttcaaatgatcttcctccccagtctcccaaactgttgggattacaggcatcagccaccatgcccagcctcactgttctttggttttgctgttttccccaaagacaaagtttggtagacaggggccaatgctttgctataattattacgaaacactattgaaagaattcttaccaaacaggccgaggtggatggatcacgaggtcaggagatcgagaccatcctggctaacacggtgaaaccccatctctattaaaaatgcaaaaaatgagccaggtgtggtggtgggcgcttgtagtcccagctacttgggaggctgaggcaggagaatggtgtgaacccgggaggcggagcttgcagtgagccgagatcgtgccactccactccagcctaggcgacagagcaagactccatctcgaaaaaaataaaaaataaaaaataaaagaatcttcatatattatatgaatataacctttaatgaagatacaaaactaactttgttcaatttcaaaggagagcaagtacttcttttggtcagggtttagaggtagttcttgcatactaagttatttaaattataataacatgctggtattgttaacatagtctgagaatttgtgtaaatggttgctcatgattattaatattattttttgagacagagtctcactccgtcacccaggctggagtgcaacggtgtgatcttggctcactgcaacctccacctcctgggttcaagcgattctcttgccccagcctcccaagtagctgaaattacagtaccaccacgcccagctaatttttgtattttcagtagagacagggttcatgttggccaggctggtcttgaactcctgacctcaagtaatctgcccacctcagcctcccaaattgtgggattacaggcatgagccactgtgctcagcttattatttatttactgctgaagaataatttcaaacatttgcaaagcaaaagcatagagcaagtcttgcccatcaataaagtttaaccttatggagaaatgaaaggggaactttttgcatgttatacattaaaatgggaactactttatatgtcattttgattggcttgatgttttttcaaagcaaatatatcactttaatcttcaaaaatatgccttttgctctgtactctctgtctcttatataaagcctctttagatcaagcatgagaaatgtatcatgttttgccaaaaaaccaaacaacaacaaaaaccttaaaaaacaaaaaagatgatagtataaaaggaattgctttttacaaatttgagtggagttgaaaagaccagtcaatgactggtatactactacttagtctagtaacaatttacaatggcttgtctcaaagaaataaagcatgtaaaatctatttctatttattttctttgtaagtagaaaaggaaacatcccatctcagtttgctgttggaatgtttgcttcaacccctcatctagtcttgtgcatgaccacagatctaagccctgtaaaaattaattactgagtctgtaggaaagctgatgggaatgtgtatcaatacagtggcaccagacttcgagcaacgtagttttcacctttttttttttttttaaggaaatgcatggtattcttgctgcattcttaagttacctctcggtaaatgctgaggaaacattctcaggctcatcatacccatattcaaccagatgttagactgctgtgtccgagtggcaggctgctgtctcaggaagagaagatagcggggaaataattccagctctgggatgtctgtcttgctgttcttgataacctattattttaaaagataaaaagagatcactaaaaaaagaaacaaaacttgccattttaatctaacttctgagatttatttctaaaccaaaatgtccaacaagttcactagctacatttcagtaattactgaaactcacacatttaagttacatggatctgattactgttaaaattcctgctccgaaacccatttcctaagattataactccttgtagatatcttctccccttttatttaaaagcaagtaacaacactgaggaaaaaaaaaaccctaagtattatctataattctactaccctcacaccataagtcttttcatttttacatatttcatgtatataaatgactgacattttaaggacaaattcataaaaattgagttacaagtcaaaaactatggaagtattcattagctatatagtcatgctgccatctaaagtttagcaatttacactattgccagtaatgtgtaagtatactactctcataaaaccttatcactggacatcatttaaaaacatccacatttcgttaatatgaagactattataaattgcttaaatttttattttttgtactagtagtgaggatgcaactgttcccatataaaaatttactacgttctacttgcgtaaccagtctgttcacatatgttttgtctatgacttaaacaaaaaatttggatgtaaaaaaacctcagatttcacattgttggaacaggatttttaagtagttgtaacctgcttataagcccacagacacaggaaaacatttaattatcaaaatattgttgtaagagtagtacatgatcaatttcatattctaaaaggatagcagggttaacactgaaactccttttttttttttttttgagacacagtctcactctgtcacccaggctggagtgcagtggcccgatctcggctcaccgcaagctctgcctcccgggttcttgtcattctcctgcctcagcctcccaagtagctgggaatacaggcgcccgccaccacgcctggctaattttgtttttgtatttttagtagagacagggtttcaccgttgttagccaagatggtctcgatctcctgacttcgtgatccgcccgcctcagcctcccaaagtgctgggattacaggcgtgagccaccgcgcccagccaacactgaaattcttgaaaacagaaactctgtacagagtcttttaagtctcaggtgaccaggctttattttcctttactctcataaccaatatcttctgcaacagaactttttttttagtatcaagagggagcaataaaaatcaaataaaaacaacactacaagccaggtgcagtggctcatgcctgtaataccagcactttgggaggccaaggcagaaggactgcttgagaccaggagttcgagaccagcctgggcaacacagcaagattctgtgtgaacacttaccaattgatggtgagcatttcaaaaatacagggccctgtaagaaaaattttgtttttctatgagaacatctcaagtatatttattaatttcatgcaaaaagtcagaagcatatagagcatatagagacccaatcctaaagagtgaagaaatagtgtcccttattattaacctgagataaaatatcaataattgggcccagtacagtgcctcacacctgttatcccagcactttgggaggcggaggtgggcggatttcttaagcccaggagctcaagaccagcctgggcaacatggcgaaacaccatctctaccaaaaaatatactacaaaaaaataataataataatagccaggtgtggtggtgaatgcctgtagtctcaggtactaggggagctgaggtgggaggatcacctgagcctggggaggtcaaggctgcagtgagccatgatggtgccactgcgctccagcctggatgactctttgagacagagtgagaccctctctcaaatataaatataaatatttatatatatacacacaattgtgtgtgtgtgtgtgtgtgtgtgtgtgtgtgtgtatatatatatatatatatatatttccttatattgctgctaccagagtttctataccaaaaaacaccaaaataagatcatggccagtgttgggatcaagtatataagtaaacagaaaaagaatatttgaggagaaggtggagaaaattatgaaataattcagagagaaataaacagaaaaaagagagagaaaagaaagtggtggaaattgttaaaagttatgtgtactattgtaaaatgtacaaaacatttctaacaatcacatttaataaattcataggtcttaaactttagattgcatagaaatcacccgctcccttgagattgtgatcaagtaggtctaggatggagcccatgaatcttcattttatataagcaatcccactacagttaattttgttgaaatagcctttacaataaaagaaaatatatgttgatatatttatttggtattattacctttttgcatgatctttagcaacacgatctcgtcaaagcgctctgtttaactcttagcatcttgagcatcttaacatctttagcatcttgcgataatgtaatagtttgacaagcatcccagaagtactgatttaccaaagcttatctaacatgatctgatcatgcttgaaaccataagactttctgcttgccaaaaacatggtcttctatttcttgcccaacctctaatccttttttcataaaactgtgtaacacatgagccaaccaagagtgtgtaaagctcctgttaaaatggggatatggccccactctaaatttccagagagaccagctgatgttttgaaataaatattactagagtttgcctctgttctatgaaggctgggtttcaaaaatacaaccaaagaaacaaaagtacagcaataaaccaaagagatataaaaaacagctagagagccatttaaaatatttgaaataagtaggagcaagtaagtgtcaatgttttaatgtactgctctattgttggatctgaaatagttcataacgcagtggttgctttgacattagtgattgctgtcacagaagcagagacttcctgttgtttgctattgtatccccagtactgaaacagagcctggcatgtagtatgcacccaacaaatatatttttttagaatgtaattattttattaatatttaaaaacatttttatgttttgaacatatttttgaatatgttcaaatattttactttagtgaatagtagtggacaaggccagatatgatgtttttctataaccttaggttagtattggtagcggttcgataaattcaaatcctttgactccaatcacaaggctttctcttaagtacttcactgatttttgtaaaatattcttaatttgaactgttattcaaattgattttaagtaaaatttgtatgtggctagatattccttgttgatttcactttcgctgacatttttactgtcattttacagtgcttacaaaatattacctgttggatttctctttttttccccaactttcattttagaatcagggggtacatgtgcaggcttattacacaggtatattatatgatactgaggtttggagtatgaatgaatctgtcccccaggtggtgatcatagtacccaataggtagggtttttttcaatccttaccctacttccaccctccccgctcttgtattcctcagtatctattgttaccatttttatgatcacgagtacccaaggtttagcttccgcttataagtgagaacatatggtatttggttttctgtttctgtattagtttgcttaggataatgctttccagctgcacctgtgttgctgcaaaggctgtgattttgttcttttacatggctgcatagtattccattgtgtatatgtaccatattttctttatcaagtccacgactgatgggcatctaggttgattccatgtctttgctgttgtgaatagtgctgcaatgaacatacaattgcatgtgtcattttggtagaatgacttattttcctttgggtatatgcccagtagtgggattgctgggtcagatggtagttcaactctcagttctctgagaaatctcttaactgctctccacagtggctgaactaatttacattctcaccagcagtagcagcagcatgtaagtgttcccttttctcccaccatctgttatattttgtctttttaagaaaagccattctgggccgggcgtggtggctcatgcctgtaatcccagcactttgggaggctgaggcgggcagatcacgaggtcaggagatcgagaccatcctggctaacatagtgaaaccccgtctctactacaaatacaaaaaattagctgggcgtggtggcaggcgcctgtagtccccagctactcaggaggctgaggcaggagaatggcgtgaacccaagaggcaaagcttgcagtgagcccagattgcgccactgcactccagccttggcgacagagtgagactccgtctcaaaaaaagaaaaaaaaagaaaagccattctgactggtgtgagatgatatcttattatggttttgattagcagttctctaatgattagtgatgatgagcatttttttcatgtctgttggccacttgtaggtcttcttttgacaagtgtctgttcatgtcctttgcccacttttaagtggagtaataattttttgctctttaacttccttaatagattctagatattagacctttgtcagatataaagtttgtgaatattttcttccattctgtaggttatctgtttactctcttgatagtttctcttgtggtgcttctgtgtgctctttagtttaattaggtcccatttgtcaatttttgtttttgttgcaattgcttttaagaacttaaccataaattccctgccaatgccgatatcggaaagggtgttcctaagttttcttgtaagatttttatagtttgaggtcttacatttaagtctctcatccatcttttgagttaacttttatatatggtgataggtagggggtcctgtttcattcttctgcatatggatagccagttatcccagcaccattttttgaataggaagttttttttcccattgcttatttttgtcaattttgttgaagatcaaatggttgcaggtgtgtggctttatttctggattctctattctgtcccattggtctatgtgtctgtttttgtaccagtaccatgcagttttagttactgtagccttgtagcatactttgaagtcaggcaatacaatgcctccagttttggtttttctttgtttcttgattttttgttttattttgcttaggattgctttgacttctttttggttccatgtgaattttagaatttttttttctagaccatcaaatatttgatgaatttaacaatgaaaatattttttcttttttttcctctttcacactagtgaggaagtaacaaaaacaggacaaattgaacagaataaatgtgtttatcatatttagattatttttcctttctcaatttatacttatataaagtaaaaataaactaattagagctaaatggggtgacttgtacctgtaacctcagcactttgggaggccaaggcaggaggatcactcgagcccaggagttcaagaccagcctggacagcatagggagaccctatctgtaaaaaaaaaaaaaaaaaaaaaaattgtaaaacattagccaggcgtgatggtacatgcctgtagtccaagtcactcaggagactgagatgggaagatcacttgaaccctgaaggttgaggctgcagtgaggcatgatcatgccactgtacttcagcctggacaagagagcaagaccttgtttctaaaaaggaagtgtatatatatatatatatatatatatatatatgcatatacatatatatatatacacacacacacacagagtatatatatgtgtatatatgtagttttatatgtataaaagtatatgtatatatattctttttatacataaaaagtgtgtatatatatacttatatattatatatatgtatatacacacacacttttttctaaatatatatacaattagaagaaattctaggcaactgccaaatccttagcactttacttcacagtttaagaattttatgtaattgggacctatattagtatgcttgggcttctataacaaaatactatagactgagtggcttaagcaacagaaatttattttcccacagttctggagataggaagtccaagatcaaggggctggccaatttggtttctgggagggctccctttctggcttataaatggctgccttcttgctatgtccttacatgacggagagggtgaaagagatctctttcttcctcatcttataaggccaccgtcatattggatcagagactcacccttacaactttatttaatcttaattaccttctaaagaccctatctctaaatacagtcacattggggattagggcttcattatatgaatcattcattatatgggggacataattcagtcagtccatagcagaaccatatcaaaattatatcttgtcttatagatgagagaagagttaaactggatttacttctgaatgaagtagatgaagttttaggtgagtcagaagaaatgatgataagacaataaaaatcatctaaatgtttaacaaaataaattattttgaaagtattttatgttatctggtccataacatattaatcctgatattgtgtctgtttttattggcaatttatatacaattaaagagacatgctttataaactaaatgttattaattattataatataatcagttgttatctacatcttacttaaaaggccacactgtaatgcctaaataacatgtcctatattctttggagtttttcaataatataatttcattctttgatagcaaaatagcaatgcaaattacacatacaggtaatatggctaccaagaacaaattcatgattcaaacacaaatgaaacaatagagcaaatattacatgctggcagaattattcataccacatcatttagcgaactctgtgtgctgtgtttgtttcttgttcccaacattgaagagctttcttctaccagaaagaagtttcatttctgaagtctcccttctcattctgtgtaattagacgacactgatgtttctgttgctttttatcctatatttgaggatgatgctacacagacataattgattttataattactattgaaatgtgatcttttttgattattttcttttttaaggggaagaaattaactatgaagacctggaaaatattctgaaaaacatagggttaagactgcaactgaaggaaaacttggtgttgatgaaaagtttgccacttgatggtaagcatttgatttatgatgaggtatttattcatcaatttactaaaagttaatgtgctgccgttaggtactagacattatatttggctctgagtcttaaagaataaaaaagacaatgtccaggtcctaaaagaattcaatatatagatagatagcacatgccaaaaaaattccatgcactatggtaagtgctataatattaataaatacatactgccatgtaagtaaaaggggaagattgaccagctatgactggaaactctaggcttcacagagtgaattttatttcaaatgagcctgaacagtttaacagtaggaaatggcaagaactaaaaagaaaaacataacaaaggcacagaggcatactcaaccaaggcatggttgaggaaccatgtataatttcatgttgagatagtatagagtacacagtgatattcacaatatgtgaagaaatttattaatttgactcaatttaatcaaagaagaagatgagtcccagggcagagagacccaggaatttttaatcattttcttgagctgacactctcctctggtcaatttcacctttttttccccataagttattggggtacaggtggtatttggttacatgcataagatcattagtggtgatttgtgagattttggtgcacccatcacctgggcagtatacactgcaccctatttgtagtctgttatccctcatcccctttccacccttccccccagtccttaaagtgcattgtatcatttttatggctttgtgtcctcatagcttagttcccacgtatcagtgagaacatacgatgtttggttttccattcctgaggtacttggcttagaataatagtctccaatctcatccaggttgctgcaaatgccgttaatattcctttttatggctgaatagtattccatcatataaatataccacagtttctgtaaccacttgttgattgatgggcatttggggttggttccacttttttgcaattgcgagctgtgctgccataaacgtgtgtacaggtatctttttcatataatgacttcttttcctctgggttgataccagtagtggaactgctagatcaaatagtagttctacttttagttctttaagcaatctccacaccattttccatagtggttgtaatagtttacattcccaccagcagtgtagaagtgttccctttttaccacatccacgccaacagctactgtttttggatttttttcttatggccattcttgcacgagtaaagtggcatcatattgtggttttgatttgcgtttccctaatcattagtgatgttgagcatttttcatatgtttgttggccatctgtgtatcttcttttgagaattgtctattcatgtccttagcccactttttgatgggattgcttttcttcttactgatttgtttgagttcattgtagattctggatattagccctttatcagatgtgtagattgtgaagattttctcccactctgtgggttgtcttaaaagagcaattttattttgctcatgattttgtaggtcaagaactaggcttttctggatccagaggagtcatttacatgatagctcactctcttaaatggcaaattggtactgaatgtcatctgggaactcagcaggacttcagtctgggacctccagttcttctctatgtgggcttctccacgggattgcttcgtcttcctcatagcacagtggctggttttcaagagcaattgttccaagagacagatagtggaagctgtcagtttcataaggcctaggcacagaaacaggtacagagtcacttctgtagttttctgtcgattaaagcaattgcagaacacacacaaaatcaaaagggaaagaacataaatcccccacatcgccatggttaggttgaaatgttaaatgaaaaaaaaaaagtgtgtcattcctactcgattgtcaagaatttttatattttaagactctatttggtttactgcatctaacacagtaccttaagttgtcattgttaaagttaatttaaagttaaattgaacaatgattttatattgctcaatatttgagggaaagtgtgaaagctgtttttctaaaattgagagagaataaactggatagaatcttgaaaaaaaaaaaaaaagacagaaagaaagaaagaaagagtgtttttccccactttatgtttttgtttgctttgtggaagattagttggctgtaagtatttgggtttatttctgggttctctattctgttccattggtctatgtgtctatttttataccagtaccatgctgttttggtgactatggacttatagtatagtttgaaatcaggtagtgtggatggctccagatttgttatttttgcttagccttgctttggctatgtgggctcttttttggttccatatgaattttaggattgttttttctaattctgtgacaaatgatggtggtattttgatggggattgcattgaatttttatattgcttttggcagtatggtcattttcacaatattgattctactgatccatgagcatgggatgtgtttccatttgttggtgtcatctatgatttctttcagcagtattttgtaattttccttgtagagatctttcacctccttggttaggtatatccctaagtattttatttatttatttattttgcagctgttgtgaaaggggttgacttcttgatttgattctctgcttggttgctgttggtgtatagaagagctactgatttgtgtacattaatctcgtatccagaaactttgctgaattcttttatcagttctaggagctttctagaagagtctttagggttctcaagataaacgatcatattatcagcaaacagtgacaatcaatttcacctttaaccacagagaaacgtagaactgaaagaaggcaatccaccaaccataaaagttacaggaagataaaataccagagggcagcttatcagtcttctcttgtttacattagtccttcacttgtgaagggtttatgtgctgccctgatgttaccttccagacacctgactattggtctagccttttgttgctgctttctatagtgaaggagtaggcaatgataatcttagattcatggtacataaaggcaaaggcaaaaatcttttaaaaagaaaagtttccctaattggtgcttcaactgccactgctagccctctaccccaggctgtaaacacacacacacacacacacacacacacacatatacagcttttcatttcccaagaattttgttatggcttttcacttggttcccacaatccaatgctcaaacttcagttactccagggttgatttgtggagaggaagccagaaatccatggaacttcaccacctatgtgggaacagatgaatttctgtaaatatgaaagctgtcacggcagcagacaacgtctcactgattaccttgaagaagaatttattgtcatgggcttgtcaatgaaaacacaaagcaaagcatccatttgatgtcatgtgaaaaatatatggaaatgctcaatgctaacattcaaagaaatcttgtcataatcatcaggttttttgctcaagaatcacctgagctaaatctaactatatctcacattatacttggaaacaccaatatgcattatcttaagcagaggagtagaaaaggagaactcagaagaaaaggagaaatcagaagcaaagagagatataagaaaggcatggcaagctaccactaattgttttgattgtcaaaaaagaaaaagtaggtagatttattatcttaagggctctcctgttggtctaattcttatttcaggtataaacacaaacacgaaaagatttaagtaaaattataagagttgttcttctgaaattgctggtttttaaaatattttatcaggcctctctatcagtttctatactgtgctttaatatcttacagctgctggaaagttgtataaatgtaagttgctgaatggaacaaggtctctcaaaggtaagtgagaaatcaggtaaaagtgattgcgtttacttttttaaaaccacatatatttggggtgatgacaagtttggcaattaacctgtttactaagtgtttttgtctcataatttactactttgaacatagtgcctttggggaaaggattttttattctatcactacatttaaaatctattttacaaatagaattataaaggcagtttctttccacatttcatcagacttgcctagttcttcagttttttccttataaatgtcccatgaaagctatagtcagatcctctagacaaaaatgggagagcacgttctgctcccgattcacatagcaattcttttcatataaacaactttattgtttctttgattgtttaccctctgttaactcatggacatgcctagtatttttcactttatccttattgtttgcatttctcattcctgtcctcttttttctaaggagtgaagcttagtgttgataagctagaacccttcatagaacatacgggctttgagcttgaggaagaggaataccaagatctgaaaaacaacctgcccatttatggtgagctgctctttaagcaaaactttcgattcatatatgagaacttctgatagtatatttagagttgtgcagaagcattaaaaaatgaaaagaactacactccagcctgagcaacagagtgagaccctgtctccaaaataaataaataaatgcataaataaataatatataaaaaggtaagagtccagtcctcaagaattaatcaattcatgcagtagactttattgagcatctaatatatataaactattaggaatacaaaaatgaagatgacaggatctctgacctctaggagttcatagtctagtaatacagcttatatgcagacaagtcatcataatgctatgtggttgtgaatatataaaaatatattcagtgagatcctaaaggaggaaagagctaagtttgccaggaaggcaatcagagaaaggcttgtcagaagatgtgtggaaattctcccagatgaaggcattccagataggaaaataatgcatacaaaagcataaatgcatgcaaagtcacagaattgttaggagagcagcaagaatttccttgtgggtagaatgtactcttcatgttacaacatggcaagaaaaaaaaaaaaggctggaaaggcagattgccaagactggaaagctgtgtagtttagctgtcatcattcttttgagcctttcagtaatgtgtgcctttctggaaatttgtccatttcatctaagttgtcttatttgttggcatgaagttgttcatggtatttctttatattcctttttcatttctatgaagtcagtaatgattttctttctcatgattttgatctgtatcttttttatttagtcagactagctaaagatttgccaattttgttgatcttttcaaaaagccaacatcaatttttcctatcaattttctgttttccatttcattgatttcagctctaatcctcattattttcttctctcagcttaccttaggtttagtttgttcttcttatggtgaaaacttaaattcttaacttaaaatccttcctcctgctcctcctcctccttcccctcctcctcctctcctcctctcctcctcctcctcctcctcctccttcttcttcttctttctctttcttcttcttcttcttcttcctcctccttcttcttctttttttctttgacagagttttgctcttgttgcccaggctggagtgcaatggcaccttggctcactgcaacctccgcctcccgggtacaagcgattctcatgcctcagcctcctgagtagctgggaccacaggcatgcaacaccatgcctggctaatttttgtatttttagtagagaaggggtttcaccatgttggtcaggctggtctcgaactcctgacctcaggtgatccacccacctcagcctcccatagtgctgggattacagatatgagctaccatgcccaaccctttcttcatttctaatacaggtgtttgcaggtataaattttcctctaagcactgctttagctgcattttgaaattttccatatttgtgttttcatttgcattcagtttaaaatactttctaatttcccaggtaatttcttcttgatccatgggttatttagaaatgtgttgtttgatttctaaatgtttatggatttcccaaatttccttctgctgttgatttagaattaattcctttgtggacagaaaatatactttcatgatttcagttcttttaaactggatgagacttgttttatggcctagcatatggtctagcctggtgaatgttccatggttgataatattcttcaagtcttctttatcctacttattttcctgtttggttgttctatccattatttagagtggggtactgaagtttccaactattatacttcaattgtctatttctcccttcaattttagccttcatactgtaggtagtggtatatctagagtattctctcttgcaaaatcagtgctgatggcaatgtagacagcattattggaagtaaagactggaacttgagagatacttccatgatccaacaagagacggtgagagcctagggaagggaagtgaacttagtgatggataacagagtgatttgggaaagattttaaaatttatatttatttattaaaactaataaaaatgtaaagtgaatagggcatggtgactgattacatgagaggtatgaaaaagtcgaagaattttaggaagggatatcttaatgagtaagtcatcagtcataagccaattcaggaagaggttcaggttaaaatgtcaggagagtagtttcagttttggacaggtagagtttgagatacttgtaagacattgacttagaaatatgaattaagagatggttggaaatgaatactctaataattcatcttatttatctttaactaggaagttagcagtccacaaatttagcaaaactttagcaatgtgtcagagcactgatgagattattagtagaccaaaaggaaaagacaacaaataaataaatggagaaaatgtctgatagggaaagtttgaaagtaaacaaataaaataaggaggaaaatagtagtaagagaaagacagaaaagaagaatttatctacagtgaattctgacctacaaaaaatgacaagtttaagatggggaatagtaataattccccttaacatcaatcacatctaccatacattagcatggcctcatcatagtgagacctacaagtatccaaaaggaaaattttccaaaataataaccctctagggaaaaaatagcaaaaacctgggattcatcccactggttccactgattatatggcattgtggaatgaagttggaattggaagtagccagacagggatttaaatctcagctctgacaactcttggctgtgcaagattggtcaaattaaccactctgaatcttagttcccttctgtcaaaaagaaaataatatctactttcataattgttataaattcttaatataggccttagcatatagtaaacatttaaaattagctttattagtagcaataataaaaatcagtatacattcatctcaacacaatgccacctatttatgctctgctctggtcagaagaaagtgaattttccattggattttttttattattggaaatatatcatttcccagtattttttatctacttataaaatgatgtagatactttttcttattcattatccaggtatcttgaaactttgctggaatgccatgatgattttggttgtagaagtgtcaactatctccttgagtactacttttcaagtcaatgagctcttaggaaatagcattagaaatattcatataaatagcattcaggctattcataagtcttctgtgggaataattaaaatatattaggatggaaaattagccaggcatggtggtgcatgcctgtagtcccagccactcaggaagctgaggcaggagaatcacttgaaccccaggaggtggaggttgtggtgaaccgagattgtgccactgaactctagcctgggtgacagagccagattctgtctcaaaaataaataaataaaataaaatgcatgagaatggataagacatcttcctccaaggcactgaccatctataagactcttttttttttagacgcagttttgctcgtgttgcccaggctggagtgcaatggcctgatattggctcaccgcaacctctgcctcccaggttcaagcgattctcctgcctgggcctcccaagtagccagaactaccagcgcccaccacctcacccggctaattttaatatttttagtaaagacggggtttcaccatgttgaccacgctggtctcaaactcctgacctcaggtgatccacccgccttggcctccgaaagtgctgggattataggcgtgagccatcgggcctggcctataagggtctttaaagacccactttaaaaggcaatatatccatataacaatattgtaccccttaaatttatacaagttttaaaaagaaaaatacaaaaaaaagtttaaaaacaaaatttaaaagatattgttaaagttcagttagattgataaaaaaattcttgatattgaagtgggtagtagaagaaggacagacagcctgagctaagtgtggattgagtgtagaaacaggcattggtgtggctgggtgtggtggctcacgcctgtaatcccagcactttgggaggccgaggcgggcggatcatgaggtcaggagatgaagaccatcctggctaacacggtgaaacccggtctctactaaaaatacaaaaaaattagccgggcgtggtagcgggcgcctgtagtcccagctactcgggaggctgaggcagaagaatggcgtgaacctgggaggcggagcttgcagtgagccgagatcgcaccactgcactccagcctgggcgacagagcgagactccgtctccaaaaaaaaagaaagaaagaaaagaaataggcattagtggccgggcacggtggctcacgcctgtaatcccagcactttgggagactgaggcaggtgtatcatgaggtcaggaattcgagaccagcctggccaagatggtgaaaccccgtctctactaaaaacacaaaaattgcgcagtggcaggtgactgtaatcctagctactcgggaggttgaggcaggagaatctcttgaacccgggaggcggaggttgcagtgagctaatatcgcgccactgcactctagcctgggtaacagagcaagactccatctcaaaacaaaaacaaacaaaaaaaatgcattgttttttggtttaggggagggattttttgcagatatgtggactgttaatgctccaagtcaaatcttccctactggagcattttcgctttttaagttgcttgatagtattataatcaataaaatagagttattccagatatcaaagtagagagggctacttcttcagtgtgtcagcccagcattctactacatgaggttaactatcttaatgaaataaaatgtgatattagaagtgtgaagtaagtatcctttttataatcagagctttttctttccacattttccatttggagttttaaaaggataaaattctaggccgggcacagtggcttatacctgtaatcctagcactttgggaggccgaggcagatggatcacttgaggtgaggagttggagaccagcctggccaacatggtgaaaccccatctctaccaaaaatataaaaattagctgggcgtgatggcatgcgcctgtaatcccagctacttgtgaggctgaggcaagagaatcacttgaacccaggaggcagaggtctcagtgaaccaagatcacaccactgcactccagcctgggcaacagagtgagaccctgacacaaaataaataaataaatatcaaaacaaaaagatgaaattctagactaaatcatacaaatttgctgaattttgtgttttccttcgaggtatgatttttttttttttttgagacagagtctcactctgccccccaggctggagtgcagtggcatgttcttggctcactgtagcctccacctcctgggttcaagcgattctcctgctcagcctcctttatattttatacaaatataaaaatttttgtatttttagtagagacagggtttcaccatgttggccaggctggtctcaaactcctgacctcaaatgattcgtccaccttggcctctcatagtgctggaattacaggtgcacctggccaatgtatgactgttaaatctgtcttctattctattattgtctttatgattatgattttgtcttgtcttatagatgaggggagagttaatgtgaatgtgatgatggatgaaggatatctttttacaggtaggttggatttttactaactcattattgagcatctatcatatcccaaccttccaggagcttgtgtagttgaggcagaaaaaatacatacaagtaaatgcaataaaattttatagattgcaaaggacctatgcaaggtaaagaaggggcaagatggtcacttgcacctaaggagaagaaattgagaaatagttttgtagagtgggcaacacatgagctgatccttaaaaaatgaaaccatgtttgtcagggagacagtgttcctgatagagggaaaaaagcataatttttgtattttcaatagagatgggctttcaccgtgttggccaggctggtctcaaactcctgacctcggtgatccaccgaccttggcctcccaaagtgatgggattgcaggcgtgggccactgtgcccaaccaagaaaaaaagtctaaatacacctataataagaaattcagttacagacatacctcatgttattatgccctgctttattgcattttacagatactgtgatttttacaaattgaaggtttgcaaaaccctgcattgagcaagcctatcaatgtcatttttccaattgcatgtcctcatttcatgtctcatgtgtcatgtcttgcaaatttttttgttatatctattatggtaatctgtgatcaatgatatttgatgttactactgtaattgttatggggtaccatgaacagcaaccatgtaagacaattgactcaactggtaaaaaaaaaaaaaaaaatgcataaacggcaccaagatgataaatgaaacagtatggaactttaaggaactagaaataatttggcataagctggatcataaaatgctatcaggagtttggcaagaaataaacgtaaagagcaaggaaggagatgtggtaggctcccaaaaatacccaggtcctaatcctcagaacctgtgaatgttaacttatatgggaaaagtgactttggagatatgattaggaaccctgagatggggagattatccttatctaagtataccttaaatgtaattacaactgtccttaagagggagacttgatgacagaaaaagtagaaggcagtgtgacaatggacacaagatgctacaatgagagctttgaggatggaagaagggacatgagccaaagaatataagtggcctctagaagtggaaggcaagggaacagattctctgccagagcctcctgaagaaaccagccctgctgacaccttgactttagcccaataaaactgatttcagactttcactctccagaaccattaagagaaaaaagctgtattgttttaaaccaccaagtttttggtaaattgttacagcaacaacaggaactaacacaggggacaaatcatagagggccttgactaccaaataaaggagtgtgaattttattctgtggagtatggagtcattccaggattttaagctacagactatgttattagatgtgcaaattagaaagatttgctgggtgcagtggatcatgactgtaatccatcactttagggggctgaggcaggtggattgcctgagctcgagagtttgagaccagcctgggcaacatggtgaaactgcatctctacaaaaaaaaaaaaaaaaaagtaaaaaaaaaaaagttaaccaggtgtggtggcacatacctgtagtctcagctacttgggggactgaggtgggaggatcacttgagcccaggaggttgaggctgcagtgagctacaattgtaccatgtaatccagcctgggtgacaaatcaacaccctgtctccaaaaaaaaaaaaaaaagaaaaaagaaagaaagattgcttcagcaatatagagaatggatcaatggatgaaggtgtgtgtgcaagagaggagtcagggagagcagttaggaagcaaattgtcactgtccaggcaaaagacaataaaagacagaggtaatcattatcaatgagacttgagaggaagggacatatataagagatattacagatacagtattacaggatttgattcctgatcaggtatggagtttggaagaaaagaaagagtaaaggatgactgctttgtttctgagttgggtagttgggtgagtgatagtgacagtcaccaaaataagaaattcagtaaaagatttagaagtagttaccatttggggtcatattgaatttggggttcctgtgagacatctaaagagaattgaaccatacacaattgaatatataagaatctgggccgggcgcagtggctcacgcctataatcccagcactttgggaggccaaagcgggtggatcgcctgaggtcaggagttcgagaccagcctggccaacatagtgaaaccccatctctactaaaaatacaaaaaaaaattaactgggcgtggtggtgggcgcctgtaatcccacctactagggaggctgaggcaggagaatcgcttgaacccatgaggcagaggttgcagtgagccgagatcgtgccattgcactccagcctgggcaacaagaacaaaactctgtctcaaaaaaaaaaaaaaaagattctgaagccacctctttttccaagacaagcggacttaaagtcaggaaggacacagatatagagaatctatgtagatttgggagtaaaattcaaaggagtttacctaaaagcttcaattttctttgtaaagtagaagacaggatcatctactaacaggaaggacacagtggtggggtagggaatttcaagaagagtattggtgattttacataactttgtttcttgtttttgtttttagttttatatatgtaggggatacaagtgcagatttcttacatgtatatattgcatcgttgtgaagtctgggcttttagtatacccatcactcaaacagtgaatactgtacccaataggtaatttttcaacccttgctcccacacgctcccaccttttgtagtctttaatgtccattattccactctgtatgtccatgtgtactcatcgtttagctcccagttgtaagtgagagcgtgcagtacttaaccctctgtttctgagttattttgctgaggataatggcctccagttccatccatgttgctgcaaaagacatcatatcattgttttggtgtctgagtagtattccttggtatatacatactccatcctttctatccagtcctccattggtggacacttagattgattccacatctctgctatagtgctgcaataagcaaaagagtgcagatatatttttaatataatgatttttttcccattgggtatatacccagtagtggaactgctggatcgaatggcagctccatgttttagttccctgagaaatctccatgccgttttccataaaagctatactaatttaattttgtataactttgatagaaaatatgaactaaagttaataaggaatacatgaaggcattgctgagaagtgccaagaggtaaccatagttaaataccattaaaacataatggcaacctttcgtatgattatatgatattcttcagttggaccaaattaggagattctaaggctcatgtaccaaaacaatgaaagcatagagacttaaccgtgtagtccaagaaaatgagtaagtgttctagtgtggatgcagaaagaagtgaggttgtgaacttagagaaaagtgagagaagaggaatgaaattctctataaagatataacacatgtggtataagtaaggaagtaaaataaatggaagaattacaaggtattggccaaaagtcagcatgttagaatttaaggttttagaggtaaagcatttctaggtgatgacaaagtccagaatgtgtgcttgagagttaactagtgtagaatttaagagatagtcattgaggataagaaggtcaagaaatttggaggccagtcattgaatgagttatctgaataaaggctggaattccttataatgatgccaggagttttggaggaagaagactatgggtcatgggacaagctcctaaagtgaccaagaagccagtgggtggcaataaaaataagagatagtcattgaggataaggaggtcaagagatttggaggcgaagtcattgaatgagttatccatataaaggctggaattccttataataatgccaggagttttggatgcaggagaagactatgggtcataggacaagctcctgaagtgacaaagaagccagtgggtggcaataaaaagaaagccaaattccataaatctcaaaagagaagaggtttggatttagttggaaatcagcagttgcaatctaggagaatgccaagccctgagacaattaggacatagaaaaatgagtagtcttggcaacagagcaagactccatctcagaaaaaaaaaaaaaaaagaaagaaaaagaaaaagaaaaatgagcagtcttatctcaaaaataaaagcaagtaatagaaaattatattaggaagaggaaaagttcaattaagaaggaaggttaaaagtctgtaaagagactaaaaatacagagaaattcatattctatttcaactctaagagaagggttgaaaagaagctagcaatagaaagaaaaatatcaagtaataaaacagaatagactagagagggcagaaaattgggaggggttttcattctgaaaaatgagagcaatatggataaaaggtatggttagaccaatgcccttgaggcagacgctcccatgtcttgtcaaaagcctgatcaagttagcagactgggagcttgctcttttgtgtctgaagagtcgttcctttggctggtgacggggatattagaagccccagtggtgaagagagttccgaagcatcttggggaaaacaacccttgtgcacatttcctcctagacacttgtgcagatgactggctaactctcaagacattctcctctcaatggaaacactgcattgttgttccagaggactaaaagcaagaattttcttttgctggaattggaaaggattaggacatctgatttgtctaccttaactgcatctttagcttttgttccctaccaagagagctactgtaaacatgatgaacattcataaaagccactggactttctgtaggaagtatggcaagcaccaatcccacaaagtgacacagtgcaagaagggcaaggattctctgtatgcccagggaaagcagtgttatgacaggaagcagagtggctatgatgggcagactaagctgattttccagaaaaggctaaaccacaaagaagattgtgctgagacaagagtgtattgagtccaactgcagatctcagcgaatgctggctattaaagagaactggaaggagctaaaacaagaaagggccaagtgattcagttctgagcttcatcttttgttttattaagaaaacaatacaatcttgaggttatgctcaaacaagaaagaaattgcatcttcaagcagagaaaagagccatggtgaaggaaaattgtacacagtcatcctaagagcagactgggagatggttgcagggggcagggataactggtgatttccactctcataaccaggaactaaaactaagtttgttaccaaagaaacttgttagctttgtgtcttattcatgcttgtgatagtttggttatcacctgtctgtttccctctagcactttacattaaagttctaagaataaaaaatctctacatgctagtgttcctgaggcacacaaaaagaggtgaacttgagagtttgcatctgacttcctagccacccttaaggaaggaagcacaagaaatgcactgtgtgttgtagctaccaagaagaggaaagcagactcaccaaatccctgaggcatgatagagagccagaccaggttaaggtagaagcccctagagataggccctgtatggtggcaaaacatgcaattaagaaaattttgcaaaatcgagattccaatgtttgcacaaaattctattttaaatgcaatgtttccctttttgatacattctctcactctacctatttactggtgaacgtttgcatctaatggcttacagcctaattttcaccaccattgttttagaaaacagctcgaagattatgtctgagcaatagctggcattcttgccgatttatttcattaatgtttaatcagcaaatgatgctacatgaacatttttcttaatatagaatcatcattcttcaaactttaaaccactttcactttttactttttaaaggtgaaaaggttgatactaggaacctggaaaattttctggaaaatatggggataaagctcacagaagataaagaaatgcaactgctgaataatcttccagttgatggtaagcattaaaaatatcacacaaccaggcgtggtggcacatgctcatggtcccagctactcaggaggctgaggtgggaggattgctggggcccaggaggtcaaggctgctttgagcagtgatcacaccactgcattccagcctggatgacagggcaagaccctgtctcaaaaagtttaaatttaaaatatcatagtaaagccaggtgcagtggctcacacctgtaatcccggcactttaggaggctgaggtgagaggatcgcttgagttcaagagtttgagaccaacctgggcgacatagtgagaccctgtctttacaaaaaaaaagtttaaaaagtagctaggcatggctccacatacttgtagtcccagctacttggaaggctgatgtgggagaatcacttgagcccaggaggtggagtctatagtgagctgagatcccatcactgcactccagcctgggagacagagcaaaaccctgtctcaacaacaacaaaatcacaggattctttgaagaaggccgagcatatgaccttttgtgactaatactctctatgtaaggaatgttccatgtcccaccaacaaaatgatttcatcatattgagaactgtttccattcctgagttttattcttgaaaatgaaaaagtataaatttctggaataaaatattttaaaatgtatattctgaaattatgtatgttttgtactattttttaaatatctacattgctgcctgagacttggatttttctctgtcttacagccaaaggaaaggtatttgtgaacagattgatgaaagaattgagaggtcttgaaggtgagtgagaagtaagataaaaaggcaggtaaaactgagttcctcaagctttactgttgttttcaaaaacccttcctattttacaattttcagattattaatcctgctgtcccaactgtttattaattcattgtttatccttatatgctttaggcacactgcaatcactaaaatggtttaactacagtagactcaaaaacagtggttcccaaataaagttgtgcatcagaatcaccaggaaaaaaaaaaaaaacactgtcttagcattcagatcactaggccctttttctgtcatattgatcttggatttctagagctagtacctagaagcatgttattaaaaagtttgaggaggaggggccaagatggcccaataggaaaagctctggtctgtagctctcagcgagaccatcgcaaaaggtgggtgatttctgcatttccaattgaggtacccagttcatctcattggaactggttgggcagtggctccaacccacggagggcaagcacaagcagggtagggcattgcttcacccgggaagtacaaggagccggggacctccctccccccatccaagggaagccgtgagggactgtgctaccccactgaattactacacttttcccacggttttttcaatctgcagatcaggagattctctcatatgcctacaccaccagggccctgggtttcaagcacaaaactgggcaactgtttgagcagacactgagctagctgcaggagtatttttttgtactccagtagcacctggaaccctgtgagacagaaccattcactcccctggaaaggggggtgaaggcagggagccaagtggtcttgctcagcgtgtcccactcccatgaagcccagcaagctaagaaccactggcttgaaattcccactgccagcacagcagtctgaagtcaacctgggacaatcgagcttggtagcgggaagggcatctgccattactgaggctttagtaggtggttttccccgacagtactaagaaggctgggaggtctgggctgggtgtggcaaagcagctgtggccagactgcttctctagattcctcctcactgggcagggcatctctgaaggaaaggtaacagccccagtcaggggcctacaaacaaaatccccatctccctgggacagagcacctgggggaaggggtggctgtgggccacagcttcagcagatttaatcattcctgcctgctggctctgaagagagcagctgatcccgacaagagggattctcccagcacagcgcaccgactctggtaagggacagactgcctcctcaagtgggcccctcacccctgttcctcctgactgggagaaatcgcccaacaagggtcgacagatacctcatacaagagagctccatttggcatcaggctggtgcccctctgggacgaagcttccagaggaaggagcagggagcaatctttgctgttctgcaggcttcactggtgacacccaggcaaacagggtctggagtggacctccaacaaacttcagcagacctgcagaagaggggcctgactgttagaagaaaaactaacaaacagaaagcaacaacatcaacatcagcataaaggacccccacacaaaaaccctatccaaaggtcatcagcctcaaagttcaaaggtagataaatccacaaagaagaggaaaaaccagtgctaaaacactgaacattccaaaaagcagaatgcctcttctcctccacatgatcacagctgctctccagcaaaggcacaaaactggacggagaatgatattgacaaattgacagaagtaggcttcaggaggtggataataacaaactcctctgagctaaaggagcatgttctaacccattgaactgaagcactcctcagcaaatgcaaacgaacagaaatcataacaaatagtctctcaaaccacagtgcaatcaaattagaactcaggattaaaaaactcactcaaaactgcacacctacatggaaattgaacagcctgctcctgaatgactactgggtaaataacgaaattatttacccaaatacccatcaatcatagactggataaagaaaatgtggcaccatggaatactatgcagccataaaaagaaatgagttcatgtcctttgcagggacatggatgaagctggaagccatcatgctcagcaaactaacaggaacagaaaaccaaacaccccatgttctccctcataagtgggagttgaacaatgagaatacatagacacagggaggggaacatcacacaccagggcctgtcaaggggttgagggcaaggagagagagagcattaggacaaatacctaatgcatgcagggcttaaagcctagatgacgggttgataggtgcagcaaaccaccatggcacatgtatactatgtaacaaacctgcacattctgcacatgtgtcccaggacttaaaataaaaaataaagatcaacaaaattgatagactgctggcaagactaataaagaagaaaagagagaagaatcaaatagatgcaataaaaaatgataagggggatatcaccaccgatcccacagaaatacaaactaccatcagagattactgtaaacacctctacgcaaataaactagaaaatctagaagaaatggataaattcctcgacacatacatcctcccaagactaaaccaggaagaagttgaatctctgaatagacccataacaggatctgaaattgaggcaataattaatagcttaccaaccaaaaaaagtccaggaccacatggattcacagccgaattctaccagaggtacaaagaggagctggtaccattccttctgaaactattccaatcaatagaaaaagagagaatcctccctaactcattttatgaggccagcatcatcctgataccaaagcctggcagagacacaaccaaaaaaggggattttagaccaatatccttgatgaacatcgatgcaaaaatcctcagtaaaatactggcaaaccgaatccagcagcacatcaaaaagcttatccaccatgatcaagtgggcttcatccctgggatgcaaggctggttcaacatacgcaaatcaataaatataatccagcatacaaacagaaccaaagacaaaaaccacatgattatctcagtagatgcagaaaaggcctttgacaaaattcaacaaccttcatgctaaaaactctcaataaattaggtattgatggaacgtatctcaaaataataagagctatttatgacaaacccacagccaatatcatactgaatgggcaaaaactggaagcattcctttgaaaacgggcacaagacagggatgccctctctcaccactcctattcaacatagtgtggaagttctggccagggcaatcaggcaggagaaggaaataaagggtattcaattaggaaaagaggaagtcaaactgtccctgtttgcagatgacatgattgtatatctagaaaaccccatcgtctcagcccaaagtctccttaagctgataagcaacttcagcaaagtctcaggatacaaagtcaatgtacaaaaatcacaagcattcttatacaccaatgacagacaaacagagagccaaatcatgagtgaactcccattcacaattgcctcaaagagaatacaatacctaggaatccaacttgcaagggatgtgaaggacctcttcaaggagaactacaaaccactgctcaatgaaataaaagaagatacaaacaaatggaagaacattccatgctcatgggtaggaagaatcaatatcatgaaaatggccatactgcccaaggtaatttatagattcaatgccatccccatcaagctaccaatgactttcttcacagaattggaaaaaactactttaaagttcatatggaaccaaaaaagagcctgcatcgccaagtcaatcctaagccaaaagaacaaagctggaggcatcacgctacctgacttcaaactatgctacaatgctacagtaaccaaaacagcatggtactggtaccaaaacagagagacagaccaatggaacagaacagagccctcagaaataatgccgcatatctacaactatctgatctttgacaaaactaataaaaacaagcaatggggaaaggattccctatttaataaatggtgctgggaaaactggctagccatatgtagaaagctgaaactggatcccttccttacaccttatacaaaaattaattcaagatggatgaaagacttaaatgttagatctaaaaccataaaaatcctagaagaaaacctaggcaataccattcaggacataggcatgggcaaggacttcatgtctaaaacaccaaaagcaatggcaacaaaagccaaaattgacaaatgggatctaattaaactaaagagcttctgcacagcaaaagaaactaccatcagagtgaacaggcaacctacagaatggaagaaaatgtttgcaacctactcatctgacaaagggctaatatccagaatctacaatgaactcaaacatatttacaagaaaaaaacaaacaaccccatcaaaaagtaggcaaaggatatgaacagacaattctcaaaagaagacatttatgcagccaaaaaacacatgaaaaaatgctcatcatcactggccatcagagaaatgcaaatcaaaaccacaatgagataccatctcccaccagttagaatggcaatcattaaaaagtcaggaaacagcaggtgctggagaggatgtggagaaataggaacacttttacactgttggtgggactgtaaactagttcaaccattgtggaagtcagtgtgacgattcctcagggatctagaactagaaataccatttgacccagccatcccattactgggtatatacccaaaggattataaaccatgctgctataaagacacatacacacatatgtttatagcggcactattcacaatagcaaagacttggaaccaacctaaatgtccaacaatgatagactggattaagaaaatgtggcacatacacaccatggaatactatgcagccataaaaaatgatgagttcatgtcctttgtaggcacatggatgaagctggaaaccatcattctcagcaaactatcgcaaggacaaaaaaccaaacaccgcatgttctcactcataggtgggaattgaacaatgagaacaggtggacacaggaaggggaacatcacacaccaggaactgttgtggggtggggggacgggggagggatagcattaggagatatacctaatgctaaatgacgagttaatgggtgcagcacaccaacatggcacatgtatacatatgtaacaaacctgcatgttgtgcacatgtaccctaaaacttaaagtataataataataatataataatattaaaaaataaaataaaataaagaataaaatgaacaggaaaagtgaaaaaaaaagaagatattggtcaacagatataaagtcatagttaggaggaataggttctggtgttctattgtagaacaagatggctataataaataatagtgtattgtgtgtttcaagctagaagaaaggattttgaatgttctcaccacaaagaaatgattaatatttgaggtgatagatatgctaattacactgatttgattattccacaatgcttacatgtatcaaaacatcacatcataccctttaaaatacccaattattatttgtcagttaaaaatataaaaattttaaaaatatttccaggggattatgatggagtaaacccacagactttatttatttatttatttgtctctgttattttagcaagtttcagatcctattgtgcagacacatttataaaggttgattttggtcttagttctcctaaaagcaataacagaatcccacagctcagggtttagaaattccttacttacataccaaaaaccatgtttacttgactagtttaattgttctttgccctttctgcttatagaattgatgcctaggtgtgagctagaattacccactctttatatcattacaaattttcttgtatccatccccttatttcttaaggaacaaaagtgtcttcagataagaaggaaactttcttgaaaagcataggaattgatctcaaggagaaagaaatccggacactgaatgaccacctaccacttgatggtgagagtttttaatatcggtataccccttagtaaacctttgaacatgaggctagtagtggggctggaatgattgaaggggctagaatgattgaagatagggtacatatgaaaagaaatgagagagtaagaccttcaccatagctaccaaactgaacccaatggctaccgcttgggaagaatcaccaagaatactgccaacataaatggcaagtgtcaactcactatgtaacaccacaggaaatgccaagaattaacaagaatacataggacgtaaatcttctaatccctgctggtaatccatcgttaatagcaatgaccaacactgtgtggtcctgacacatgcaaggcactattctaagtactttcacatatcaacttatttaatcttgtaaacaaccctaaaagctaggttctgcttttatccccattctacatttaaggaaacaagggcacagaaaagtcaagtcacttgcccaaaggcagagagctagtaaatgatggaaccgggaaaagaacctaggcaatctggctccagaaactgtctcttaaccacgatgctgtatttccgtgagctaatagaattaacgaattttaaaaggtatatagtaatgttacagatgaaattaattaaacttggcgtattttagatggtctcatgctagtgaaactgagaaaaattcatcaggaaattttgggagactactgttccctagaggaaattgtaaaaatatataattaatccaagtcagtgaatactgtatgtgcttttctaaatcagtggtacctttcattcttccagtccaacaactttaaaaactatgatgcatcaggcactgttctaggcccttggtacctttgctttaataagtaagcaattttcaaaacatgactttttcttttgtttttaaatcccttctatagctctttcaatctaccagtgcaataaacgtagatacttgcggttgccctgttgtcctagtatcttggaacatcaccagcacagtgatttaaagtgtgaggcccttaacataattcttgtagaataccttgtacctctgtttaatcatctgagataggatagaatattgtttcagaacctaatgggcctcagtggagctaattggggacatagaaagggaagagtgtggtggcatgttatttacaggcagacttttatccaaaaaaaggatcttccttgtcctatttaaaagttataatggtaaccatattactactaataataaggtattataaaactataaaataataccagtccaggcacagtggctcacctctgtaatcccagcactttgggaggctgaggtgagaggatctcttgagactagaagttcaaaaccagcctgggcaacatagcaaaacctcacctctaaaaattatttcttttaattatccgggaacggccaggcgcagtggctcacacctgtaatcccagcactttgggaggccgaggcaggtggatctcatgaggccaggagtttgagaccaatctgggcaacacagtgaaaccccaactctactaaaattacaaaaattaactggacatggtggtacacacccataatgccagctactcaggagcctgaggcaggagaattgcttgaacccaggaagtggaggttgcagtgagccaagatcatgccacttcactccagcctgggcaacagagcgagactctatctcaaaaataaaaaaattttccagggatgctggtatgtgcctatagtcctagctacttgggagagtgaggcaggtggattgtccagcctaggcgacagaatgagtccctgtctcaaaaaaaagaagaaaaaataccggtaaaagattgtcataatcgctgggtgcggtagctcatgcctgtaatcccagcactttggcaggccaaggtgggtggatcatgaggtcaggagttcgagaccagcctggccaacatagtgaaaccccatctctactaaaaatgcaaaaaattagctgggcgtggtggcgggcacctgtaatcccagctactcaggaggctgaagtgggagaatcgcttgaacctgggacacagaggttgcagtgagccgagatcatgccattgcactccagcctgggcaacagtgcaaaaaaaaaaaaaaaaagattgtcataatcaaaaaagtatttaaaaagaactaacaaagataaattctgtatctaagaatctggaatgtaataattttaaagctaattcattatttataatatgtttgcattttgctattactataatttagtaaatatttatggagcatcaatcttgtgcaaaccattacactaatgcctaggtgatagtaagaatgcaaagtgattcttggtatcttgtcctcagataaacttatagtcttaggaatattacaaataatacaacagtgtgaacatatttgagcagtgatgaattgacacccttgaccaagtcataaatagaaaatgagtgtgtccttcagcagctgtaaggttccaaactgaatcttgcctataagagtaataacatctcttaactactagcttaacctgccaatccagtgtctctcaaacttgcaatcttacaaactgcttaaaatttatccgctgacttccagtgacttcagactttaatttgagaaatactgatcaaagaaactaagtacatggtctatgaaaatatattttaattgagaatggtcatggcaaaataaaagttttgtcatcacaaatggactttaactagatatatcaacatgacacttatgttggcaacctaaaagcaaccagatgtggataccaacactctcatcttttagtggataacttagtgccagagtcatcctaagcctaaaggtaaagtcagcgttgacaaaaatggaaataccatttttaaacaaaattttttaattctcaaatttccaacccctgaatagactaacttactataatatattgattgtcctgaaggaaagaagaatgctttaaactttactcttgcattgtgaaatgtagattttgtttgtttataggataaatagtagtagctatattaattaaattcatgagcattggacttggaaaaataaacttctagggaaatgtttttgaataattgacttttgattttctatttcaaaatttaaggaccttatatcatttttccataaatctttttgatgcttttttatcttaaagataatgggaagattgatttgaatgtgatgatggatgaagttaaaaatgttacaggtgagtgagatgttacagtaaatactacattgtgtgatcttaaagttttatatggaactatatttttaacacaataatgtttcttccactcatttatttaacaattatttatagagtatttaccacatgccaggcattgttccaggcatataggctacatcagtaaatactacaaaggtcactgcctcatggagcttagattctagcaggggaaataagcaataaacaataaacattaaacataagtacattatataatatgttagaaagttatttatgctatggaaataagtgaaaaatagataaaggagattgggagagcagggagtgttggggaaagaggcaggtgtgtttttaaacagataagcaggccttcttgagaaggtgacatttcagcaaacacttgaaagaggtgagggttttgaccatgtggggatttctagacaaaaagtgttgcaggcaaaggggacaaggacaaaggcaggagcatgcctggtatattcaaagaacagcaagaaggtcggtgtagctgaagctgagtaactaagtaaaaaagtaatagggagactgggcacggtggctcacacctgtaatcccagcattttgggaggccaaggcaggcagatcacctgagttcaggagttcaagaccagcctggccaacatggtgaaaccccatctctactaaaaatacaaaaattagccaggcgtggtggtgcatgcctgtagtcccagctactcaggaggctgaggcaggaaaatcacttgaacagggaagcagaggttgcagtgagctgagatcaggccactgcactccagcctgggtgataaagccagacccaatctcaaaaaaaagtaatgggggatgagaagagaaaagtaatgggtgcattacttatttttgaaagccctgcaaggacttgggcttattttctgagataaacagaaagctattgtagggtttaaaaccaaggtgtaatattatctgacctatgtttttatcagatctttccggatttgttttgagcatagactgggggtgggctgggaggaaggaatcaacagtagaaatagggaaaccatttggctgggcacggtggctcatgcctgaaatcccagcactttggaaggctgggatgggtggatcacctgaggccaggagttcaagacgagcctggtcaacatggtaaaagcctgtctctactaaaaatgcaaaagttaggtgggggtgggggtgcacgcctgcaatcccagctacgtgagaggctgaagcacaagaatcacttgaacctgggaggtggaggttgcagtaagccaagatcatgccactgcactccagagcagactctgtctcaaaagaaaagaagaggagactgggcgcagtggctctcacctgtaatcctagcactctgggaggccgaggcgggtggatcacgaggtcaggagctggctaacacagtgaaaccccgtctctactaaaaatacaaaaaaattagccgggcgtggtggagggcgcctgtagtcccagctactcgggaggctgaggcaggagaatggcgtgaacctgggaggcggagcttgcagtgagcccagatagcgctactgcacttcagcctgggtgacagagcgagactccatctcaaaaaaaaaaaaaagaagaggagaggggaggggaggggaggggaggaaacagggaaaccattttgagggcctttagagtaatcagtgttagggatgctggtgacacaaccagggtggaaggcaatggctggattctggacatattttttaaagagtcaaaagaattttctggaggattagatacaaagtactagataaaaggagaagtcaagaatgattctaaaatttttgtcttgaacaactaactaaaagggtagtcttgccattaactgagatgagaaaagttaccagtagtacaagtttgggtggaagaaaattaggaatccaatttgggacattttgagataactaatagacctccaaatgcaggtgtcaagtacaaacttactaaacagactcaaattcaagaaatatatcttgggtaaaaatataaaattgaaagtcataggcatatagatggtatttaaagccaggagattgagtgaattcactcaaggagtgcgtataagtgaagaagagaagaggactaaagaaggaaacctggagtacttcaatattaagaagtcttaaagcaaagaagatgaggagtagccagtgatgtaggtggaaaaccaagataataaggtgccctgaaaaccagataaggaatattaaattaagttgggtgcccccagaaaacaaaccctgaaacgaggattacatatacaggtagtttgcttaggaagtgagctcaggggagcagagaagtgagacatagataatagcagccaataaagtgtttatcaaacaagttaccattgcaggtaactggagcttaatcgcactggagaatatctggtaaatgacatggcctcaagagaggggtaatagagctaggttatttccacaccaactcatatcagtcattggttaaaaactgcttaagggaggggaaagcagtattactctgctggcatttctagccatctgagcataggcagagtgaactctggcagctgaagaaatccctcagaaaaagagatactagtaactgaaagtggaaaagcatgcattgatatgaggggatatgagcaggacatctatagcatctgctacagttaccagacaagagggcaaatcaatagtcaaatgctgctgataggccaactaacatgagaaccgagaattgacaattgcatatagccacatggaggtcactggtgatatccaaagagcaacttcaggtagtgaggatgagaagaagcctaagtggaatgagtccgaaataatgggaaataggatttagaaactgtgtgaatatctaaggtgtttcactgcaaaagagagcaaagtggaataagggcataggtaaagtggtgaaaatggtggtaagaggcggcttctttttttaattaaagagaggaaagaagtagtgatcaagtgaaagaagaggaaacagtggtttgaaaagaggaacgaaggtgtgaagtagtcataaagaagagtaggaaaattaaggaaccaggaaagtatagtatgattgccccagagcagtaaagacccacttgaggttcatcatcatcaatgtaaagtgagggtagtcagcgtagttcgctttagttctagttagctacatggctgtaggcacagagtagtagagacttgcatttaaccagcagtgggattttgtcaagtgagtatattaaaagcaagaacagagtaacttaaagccaatcttctgcaagatgtaaatacagttaaagctttccttactcactgatgcttttaacttcctagtcctttgtgggttcatccttcttagtgatatcaacaaaagccagtctttgtctaaaagtatgtttattttacaatcatctttgaatcatagtttggctgaatctaaacttgtagattgtcattttatcttagaactctggaaacaaatgattcttttttttttttttttgagacggagtctcactctgtcacctaggctggagtgcagtggcgccatctcagctcactgcaagctctgactcccaggttcactccattctcctgcctcaacctccaaagtagctgggactacaggcgcccgccaccacgcctggctaatttttttgtatttttagtagagacggtgtttcaccgtgttagccaggatggtcttgatctcctgacctcatgatccacctacctcggcctcccaaagtgctgggattacaggtgtgagccaccacgcctggccatgattcatctttgaatcatagtttggctgaatctagacttatagattgtcattctatcttagaactctagaaactaatgctggtgtctgtccctgaggagagtataataaagctggttccacaaggttgaaaaactgaaaactggattcagccactactgcaggaaggaactgcatcttccagcctttcagactccctctagcactctccgttggcagaatttaacatggagccagaaacatagtttacagagtctcaggctcagcatcataaagctaagtatagaacggtaggattggagctgagagacaataactaaatagctgaaagagtacccttttggctactcagctacaatccttctgcatgtatttgaacttctatttatcaaaaaaaaacctctgtttccacctaataagatgcaactattcttcttataaatgaagatattctttttcaccctctccacagaatgaggagaaacaaagttccaacagtccatctcgggtagacagtcatactatctctgagctgtgttaattacttatcaaatttagttacagtgctatctgaatattctgttacctaaagcctaaattgtaaagttaacatataacaaaactaatatttaaattaaaaatggaaagagggaaaagaaaatatataccatgtgcatgtgcgcacacacactcacacacatatacacatagacatacatatatacacacactacatatatatgtatttatgtattgattgtttcctggactctttttgctgttaaaaaaataagctgtcttaattgggtttttttgtttgtttgtttgttttggagggggacagagtcttgctctgtcacccaggctggagtgcagtggcgcaatctcagttgacggcaacctctgcctcctaggttcaagcaattctcctgcctcagcctcctgagtagctgggactccaggcatgagccacatgcccggctaatttttgtatttttagtagagatggggtttcaccatgatggccaggctggtctcaaactcctgacctcaagtggtccacctgccttggcctcccaaagtgctgggattacaggtgtgagccaccacacccagccttaattatttattaatagctactttttctcttgtaacttttaagattatctctatctttgaagttttcattataatgtctccaaatatacacttcttttcatttttttgctcaagacttgtgattcctgaaactaaaaattcatgcctttcatcaattcttgaaaattcttaggctttatgtttcaaatattgcctcttctctttttcttttacttttggaaactcccattatgtatatgatggactttcttattctgtctttcctatctttttccatattttccactttttatattgttctcctttttcttagaatttctcaaatctctcttccagttcactaattctctctacaactccatctcacactgtttattgaaaatgccaataacaattttttatttctagatatcattttacatcttttgcacactagcctgttcttttcctcaattttttattcttatgcttctatctatgccctttctttctctttaataggtttaatttaatttaattaatttatttatttgagtcagagtctcattgtgtcacccaggctggagtgcagtgtcatgatctcagctcactgcagcctccacctcctgaattcaagtgactcttgtgtctcagccacccaagtagctgggattacaggcatgtgccaccacacccaaataattttttttttgtgtgtgtgtttttagtagagacagggtttcagtgttggccaggctggtctcaaactcctggcctcaagtgatccaccttcctcagcctcccaacgtgctggggattacagatgtgagctactgtgcccagtctctttaatggactttaaatatgcagtgtttcaaatctgtgtccctatcatgtgctcaggaacttatctccctgctcctgcttgggcattaaaacaaagctgttgccagatctggtcagataacccactagggttatctccacatcaaattgagtatttatctcagcaccataggaaaggttaataaaaaaagaaagaaaaaaaattgactacatatcaacttgactcttaaaaccctctctatttcctgaaaccaaaaatttttcttcctttctgacaaactcagccatccatctacaattattttgtcattttttaatccattttagatatttgtagcaagtaggatgtcctactctattgttttgctggaaaaagaagttgtgttcataatttctaagtagtttatgatctcagtttcaacttatttaactcagcagttatttaaagtattttatttataatttccaagtagagaggatttcttaaatctctttctgtggttgatttcacattttttcttcttttatttttattttattttattttattttatttattttattttattttttttgagacagagtctcactctgtcaccaggctggactgcagagcgatctcggctcactgcaacctccatctcccaggttcaagcaattctcctgcctcagcctcccaagtagctgggactacaggagcacaccaccacacccagctaatttttgtgtttttaatacagatggagtttcaccatgttggcctggatggtcttgatctctagatccacccaccttggcctcccaaaatgctgggattacaggtgtgagccaccgcacccagctgactttaaattataattagaatatgactaatatactttttgcctttgagtaatttattgagatttaaatttttgtcttaaaacatgatcaattttagtaactgttgcaataatatttgccaaaaaagtcatagtcctgcttgttaattatgatttttttttttgagacagagtctcactccatcacgcaggctggagtgcagaggcccgatctctgctcactgcaacctccgcttccagggttcaagtgactctcctgccgcagcctcctgagtagctggaattacaggcacatgccaccacacctagctaatttttgtatttttgtagagccagggtttcaccatgttggccaggctggtcttgaactcctgacctcaagtgatctgcccacctcagcttcccaaagtgctgggattacaggcgtgagccaccacacctggcctaattatgttttatatattgagcagtttcaatgtcagttttaccccttcaaaaattttgttttcttcacatagtaaatagtaatgatcaagtgaatgaactctctgaaatttcaatcagtaatgtattttgctttggtgatgttcaaacaattaattaactcattctgcatttagttgatcactggctatgtgccaggcattatgctagattttgagagaaagacatgatccctgacttcccgagtttacaatgtaattatataaatgtaaattcactcaaggtgaaatatattacaaggagtcagattttattgtcatttttaacttaccccataattaaggcaaaagaacaagagggaaggggatagggaagaccaaaaagaagaagaaagaagaaaaagaaaattaaaaatagaggtgttcttgtggtattatttatattaaccatgaaacagctcccaaattattgagaaattatacagtttctgttttactttatatgatattgttttatcattgtaagagattttattttacttaggttaaaagaaaaatttctgactcccctccttgactctagatagctaaacaaggcctgatacagtggctcatgcctgtaaccctagcactttgggaggccaagccagatggatcacttgaggccaggagttcaagactagcctgggtaacacagggagacccgatctctacaaaaagtacaaaaaattagccccatgtgctgttgcatgcctgtagtcccagctactccgagggcctggggtgggaggatggcttaagcccaggaggtcaaggctgcagtgagccatgatcatgccactgcactccagccaggatggcagagtgagaccttgtctcaaaatagtaaataaataaataaataaataaataaataaatagctaaacaagcttttactatgctttgctcttcccccagcagctcaggattatacacacacacacacacacacacacacacacacacacacacatataattatatatatacaaacacaggtacatatatatgatatataatgttatatgtagttataatgttatatgttaatcataattacatatattatatgttaattataattacatataatgtatataatttgatatagtttggctgtgtccccacccaaatctcaacctgaattgtgtctctcagaattcccacatgttgtgggagggaactacagggtggtaattgaatcatgggggccagtctttcccatgctattctcatgacagtgagtaagtctcatgagatctgatgggtttatcaggggtttctgcttttgcttcttccttattttctcttgccactgccacgtaaaaagtgcctttcacctcccgccatgattctgaggcctccccagccatgtggaactgtaagttcaattaaacctctttttcttcccagtctcaggtatgtctatcagcagcatgaaaatggactaatacataattataatgtcataatataaaatatgacataattcttatattcttacctatgactatttcccttcctctaaaggagagcagattcatgctggggatgtgaaaaatgttctggaaaacatgggaatagagatcacaaataaggagcacaaaaagcttctgaaaactctgccagtttctggtaagcatttacatgtgttctccttcactgatgtccaaaaatatattcattcagcacttactgaagatcattttctgtgtggcactatctaaaacctgagagaacagggaccatgtctgattccccaagtccttacactcttgaaaatttcaaagaggttggttttaaggttttgtattagaaattctaatatttgaaacagttgttcaattaaaaatattttttaaaaggctcagtcctagcatttctaaaaatcctgttattattatattggtttaggaaacatgaacctcttcagtcagaagtcctatcataaggcaatttcttttgtcccccctaggaaaaagataagacttaaggtataaactgaaaaaaagtaagagcagaaggggtagaaaaggtgaagaaagaaaagatgaaggtaaattagagaggagaaaacaagaaaagaaaggctatgtgtagttcagcacggtagggcaccactaacaatagtttgtattctatccagtggataggttcactacactgagttttccaaatacctttcatttcattgagattaaattgtaataaatttctaaattttcccttcctgtaagtatatattttaatttttatgaatctctgaaagcattattaatcatgttttatcctacagctgataaaaaggtgtttaagaaagaattattggatggtgtgaaatccttcagaggtaagtgaggaaaaggataaggacaataatatttgatattgttctaattggttttttctgattacataaataagcagaaaattatgcattttattcaacaaatattcaagtgtctactagatgctgggtatttgagaataatctggaatatatatagtagcatacagaaaaaatgtaattacccacaatttcaagtaatattaccttttctattacagatatctttgatctttttcctgtgcatatatgtgtattattaattaaactcttactagaaatgttacgtatcctgcatttaatcctaaaattttagtgtaataatttcaccatgttatttaaaatttctttgtaaacatcattttaattactatatcatctggttgtattataatttacttaatcattgttctcttgttgaacatttatttagtgtttttctcttatgtgtctctgatcttcatacataaatcttgatccaactttaaagtcattttctttggatatattcttccagcaggaatttgcacctccatacatagtattaccgtcatgccctaaacacagtatattatttttatattttttattcttgttcatttgatggatgaaaaaattgaattaatttgatgaaaatattgaatctaattattgttctgatttttttgttatcgataaagttgaaaatatttttatattggtgatatgtagctgtggtcccagctactcaggaggctgaggcagggggatcacttgagcccaggagtttgaggctgcagtgagactggatggcagagccagaccctgtctcaaaaaatatattaaaataaaaacaatttttaaatcggctttatattgttgtgttagtccattttcatgctgctgataaagacatatctgagactgggcaatttagaaaagaaagaggtttaatggatttacagttccatatggctggggaggcctcacaatcatggcggaaggcaaggaggagcaagtcacaccttacatggatggtggcaggcaaagagagagagcttgtgcaaggaaactccccgttataaaaccatcaggtcttgtgagtcttattcactatcacaagaacagcatgagaaagacctgcccgcatgattcattacctcccaccgggtccttcccacaacacatgggaattcaagatgagatttgagtggggatacagccaaaccatatcaattgttttatatttaaatcacagaattctcacaaggatagtggttgttttctctttaatggaaaaagaaagcttattttgaggattttttcattcatcaaacattagactggcatagtgtggggagtgtggtgggggaggggctacaaaaagcagaagatagttctttaatttctttttttgttgtttttttttttttttttttttgagatggagtttcactcttgttgcccaggctggagtacaatggcacaatctcagctcactgcaacctccatctcctgggttcaagcgattctcctgcctcagcctcccaagtagctgggattacaggcatgtgccaccacacccagctaattttgtatttttagtagagacggggtttctccatgttggtcaggctggtcttgaactcccgacctcaggtgatccatccacctcagcctcccaaagtgctgggattacaggtgtgagccaccatgcccggctggtagttcttactttcaaagagtttataatctacttagagaacaaaatatatacataaaatcactcatagaaaattttgatcagcaccataagacagggcaagaaaaaaatttaagctgggcgtggtggctcacacctgtaatcccagcactttgggaggccactgtgggtggatcacgaggtcaggagttcgagagcagcctggccaacaaggtgaaaccccatctctactaaaaatacaaaaattagccgggcatggtggtgcccacctgtagtcccagctattcgggagactgaggcaggagaatcgtttgaacccaggaggcggaggttgcagtgagccaagatcacggcactgcactacagcttgggtgacaaagcgagacttcgtctcaaaaaaaaaaaaatttaaaaatttttaaaaattttaaaaacataaatgaaaaaggaaaaaatttttcaaaaagaaaatgtttttatatcattacatcttttaatctattgaagtccaaacattgtttctattaatatgaatgacctctttatagattaaatattagcacattgtcatacctattgtaaatattttctgaattcgttatcggctttttattttattgtatttttacaacagctttattgagatatagttcatataccatacaattaacctacttaaagtgtataattcaatgggttttagtatactaacagagttgtgcagtatcaccacaatcagctttagaatatttcagcactgcaaaaagaaactcaatacccattagcagtcactacttataccccccaactctcgcagacctaggcaactacaaatctactttttatccattatgttgtattttgatatatggccatttttcatgtttatgtatttaattttatcagtcatttcttctgtgattgacttttaagtcctttataagctagccagtgtgtgaagaatcacatatatttagttttctttgtttttctattatttcactttttacatttaattatttatctgaaatatatattgactctttattgactctttttaaatccccatgtttcagaatgatttgatcaaaactacaccaatagttttcagtaattttccccattaactggagtcctcctttatgtacaattacacttgggagataatttattattactgtagcaaatttcaaatcttactttttgacagaataacatgatttggttgttatctctaattcatcagaaatgccaaactctttacttctcctcccagtataaacttcttccagaagtttaattttggaagcatattctgttcctgacgcccacatgacttgctgtaaatagcttctttctgctttcatttctgagtaggggttgagagtatgcatttttcattttatgacatccttatctactttttcttgtttctatgaaggagggcaggttaatgtcaatgacctaacaagtgttctacaaaacactgggttcagactcgaagcaaaagaaatcaacgacctgaagactcacatgccagtgactggtgagcatttaagacacctttatcctgtagataatgactagtctactgtgaaagcaaagagtaaagacatgttggagagagaaaaactggggacagagatacaatttaagatactgttaataaggtacaggtgataagggccttacctgggaaccacacatacatggggaagactgatttgatgtggtgggtgaaagggagggagatactaaagtgtgcaccagaagtttatcacttatgtgactgccaaaaaaccatttttaagaacagggagaaggatagcagaggaagcagaatgaagaaaaatctttgaaatatagttgaattgaggtacttataggacactcagtatcagacaattgaaaatgcattccctaattattagttattcatctttaaacaaggtacatcaaaccgtgagaatcatcaccagggttaaaacagtgtctcagagtgtctctatgaggacaagaataccaaaagaatggaaagatagaataaagaaatatttgagagataaaaaatggaataaaagagtaggataaggaagaaagagattacagaaagagatgaggggagggtaagagaaaataaaaagtataagaagagatgaaaagatatatccatcaggatacagaccaatctcctatttttgaatttttatatatttttttattatttcaatagctttgggggaacaggtggtatttggttacatggataagttatttagtggtaatttctgagattttagtgcacccattacccgagcaatgtacactgcacccaatgtgtagccttatccctcaccccacttctaaccttccccttgagtccccagagtccattatatcgtttgtatgcctttgcatccttatagcttagctcccacttataaatgagaacatacaatgttcatttttccattcctgagttacttcacttagaataatggtctccaactccatccaagttgctgtgaatgccattatttcatcctttttatggcagagtagtattccatggtatatatatgtaccacattgtctttatccactcattggtcgatgggcatttaagctggttccatatttttgcaattgcaaattgtgctgctataaacatgcatgttcatgtgtctttttcatataatgacttcttttcctctgggtagatacccagtagtgggattgctagatcaaatggtagatctacttttagttctttaaggagtttccatactgttttccatagtggttatactagtttacattcccaccagcagtgtaaaagtgttccctttttaccacatccacaccaacatctattattttttgattttttaattatggccattcttgcaggagtaaggtggtaccacattggggttttgatttgcatttccctgatcattagtgatgttgagcatttttcatacatttgttggctgtttgtatgtcttcttttgaaaattgtctattcatgtcctttgcccacttgttgatgggatttgttttttcttgctgatttgtttgagttccctgtagattgtggatatttgtcctttgttggatgtatagtttgcaaagattttctcccactctgtgagttgtctgtttactctgctgattatttctcttgctgtgcagaagctttttaattaagtcacatctatttatctttcttttcattgcatttgtttttgagttcttggccataacatctttccctaagccaatgtctagaagagtttttctgatgtcatcttccagaatttttatggatttgggtcttagatttaagtctttgattcatcttgagttgatttttgaataaggtgagagataagggcccagtttcattctcccacgtgtagcttgccaatttttacagcaccatttgttgaatagggtgtcctttccccacttcatgttttttgtttttttgttttattttggtttttttgtagatatggggtttcaccatgttggccaggctcctggcctcaagtgatctgcccaccttggcctcccaaagtgctgggattataggcgtgagccaccatgcctgacctgtttacgtttttgtttgttttattgaagatctgttggctgtaagtatttggcttttttctgggttctctattctgttccgtgcctatttttataccagtactatgctgttttggtgactatggccttatagtatagtttgaaatcaggtaatgtgatgcctccagatttgttatttttgcttagtcttgctttggctatgtggactcattttttgttccatatgaattttagaattgttttttctagttctgtgaagaatgatggtggtattttgatgggaattccattgaatttgtagattgcttttggcaatgtggtcattttcacaatattgaatgtacccatccatgagcatgggatgtgtttccatttgtttgtgttgtctataatttctttcagcagtgttttgtagttttccttgtagagttctttcacctccttggttaggtatattcctaagtattttttttttttgcagctattgtaaaagaggttgagttcttaatttgattctcagcttggttactgttggtatacaggagagctactgatttatgtacattaattttgcatctggaaactgctgaattattttatcagttctagcagctttctgggggagtcttcagggttttctaggtagacaatcatgtcatcagcaaacagcaacagtttaacttccttcttatcaatttggatgccctttatttctttctcttgtctgattgctctggctaggacttgcattactatgttgaacagaagtggtgtgaatgggcatccttatcttgtttcagttatcagagggaatgctttcaacttttccccatttagtattatgttggctgcaggtttgtcatagatggcttttattacattgaggtatgtcccttgtatgccaattttgctgagagttttaaccataaagggatgctggattttgtcaaatgctttttctgcatctattaagatgaggatgtgatttttgtttttaattctgtttatgtggtgtaccacatttactgacttgcatatgttaaaccatcactgcatccctggtatgaaattcacctgatcatagtggattatctttttgatatgttgttggattcggttagctagtatagtattttgttaaagatttttgcatctatgttcatcagggatactggtctgtagttttcttatttggttatgtcttttcctggtttttgtattagggtgataccggcttcatagaatgatttagggaggaatccctctttatcttgtggaatggtgtcaataggattggtaccaattcttctttgaatttctgatagaattcagctgtgaatccatctggtcctggactttattttcttggcaattttttattatcatttcaatcttgctgcttgttactggtctgtttagagtttctgtttctttctggcttaatctaagagggttgtgtatttccagaaatttatccatctcctttaggttttctagtttattcatgtaaaggtgttcatagtagccttgaatgatcttttgtatttctgtagtatcagttgtaatatctcctattttgtttctaattgagcttatttggatcttccctcttcttttcttggttaatcttactaatggtctatcgattttatttatcttttcaaagaaccagctttttgtttcgtaattcttttgtatttttttgtttcaatttcatttagttctgctctgatcttggttatttcttttcttctgctgggttagggtttggtttgttcttgtttctctagttccttgaagtgtgtccttagattgtctatttgtgctccttcagactttttgatgtaggcatttaaggctatgaaccttcctgttagcactgccttttctgtatcccagagcttttgataggttgtatcactattatcattcagctcaaagaattttttaatttccatcttgattacattgttagcccaacaatcattcaggaacaagttatttaatttccatgtatgtgtatcaaaccccttttagagtttatttccaattttattccactgtggtgtgagagagtacttggctactatttcagtttccttaaatttgttgagacttgttttatgccctatcatatgttcaacttggagaatgttccatatgctgatgaatagaatgtatattctgcagttgttggatagaatgttctgtaaatatctgttaagtccatttgttctaggatacagtttaaacccgttgtttctttgttgactttctgtcttgatgacctgtctactgctatcagtggagtattgaagtcccccattattactgtgttgctgtctgtctcatttcttaggtctattagtaattgttttataaatttgggaacttcagtgttaggtgcatatatatttaggattgtgatattttcctggacaagtccttttatcattatataatgcccctctttgccttttttaactgctgttgctttaaagtttgtttagtgtgatacaagcatagctactcctgctctgttttggcgtccatttgcatggaatatctttttccaccccttatcttaagtttatgtgagtccttatgtgttaagtgagtctcctgaaggcagcagatacttgtttgatgaattcttagccattctgtatcttttaagtggagcatttaggtcatttacattcaacattagtgttgagatgtgtggtactattctgttcatcgtgctgcttttgcctgaatatcgtgtgtggttttgtttgtttgtttgtctgtttgtttttattgtgtcattgttttataggtcctgtgagatttatgctttaaggaggttctattttggtgtatattttggtgtattttgaggatttgtttcaagatttagagctccttttagcagttcttgtagtgctggcttggtagtgatgaattctcaaagcatttgtttgtctgaaaaagactgtatctttcctttatttatggagcttaatttcactggatacaaaattattggctgatagtatactttaaggaggctaaagatagggccccaattccttctagctcataggtttctgctgagaaatctgctgttaatctgataggctttcctttataggtcacctggtggtttttgcctcacagctcttaagattctttccttcatcctaactttggataacctgatgactgtgtgcctaggtgatgacctttttgcaataaatttcccaggtgttctttgagcttcttgtatttgaatgtctggatctctagcaagttcagggaagttttcctcaattattccctcacttgaacccaggagttcaagagcagcctgggcaacttagggagaccccatctcttcaaaaaataagaaaaaattagctggcctgctggtatgcatttgtggccccagctacttgggaggctgaggtgggaggatcacttgagcccaggaggtcgaggctgcagggagccaggatcatgccactgcactccagcatgggcgacagaaaaaaatcctatcttaaaaagaaaaagaaattctgggccaggcgccatggctcatgcctgtaatcccagcactttgggaggccaaggtgggcggatcatctgaggtcgggagttcaaggccagcctgaccaacatggagcaaccccatctttactaaaacacaaaaattagccgggcatggtggcacatgcctgtaatcccagctacttgggaggctgaggcaggagaatcatttgaacctgggaggcagaggttgcagtgagccaagatcgcgccattgcactccagcttgggcaacaagagcgaaactccatctcaaaaaaaaaaaagaaaagaaaagaaaaagaaattctgctttcatttaggtttgttatctttaccacaatttatcaaatttgtctaattctttttcatccatattacttcaattgaaaattatagctcaatgttgagggagcattttctcttctcaactctgacactgagtggccaatatattatttcattctccacttgatataaatgcatatttaaagttagcatcttctgggccgggtgcagtggctcacacctataatcccaaaactttgggaggccgaggcagacagatcacctgaggtcaggagtttgagaccagcctggccaacatggtgaaaccccatctctactaaaaatacaaaaattagctgagcgtggtggcacacacctgtaatcccagctatctgggaggctgaggcaggagaatcacttgaacccaggaggcagaggttgcagtgagctgagatcatgccattccaacctgggcaacaagagtgaaactccatctcaaaaatagtaataataataataataataataataataataataaagctggcatcttccacttcttcaaattacttgtttttcttattccatcctcttaattcctaaggaaaaaaagtcaatgtcagtaatctggaaactcttctaaataatatagaaatcgaagttgggaaagaggaatatgaggacctactgaaccatctgccagttgatggtaagtgtttcagataccactgtacctaggagaaacgcagggcttctgtaggaaggcttctgaaagtaaacctattttttaacctctttgaaaagcttatgaaatatttcaaacatacctaaaaacagagaataacataacaaacattgtgtgcccactggccagagttaacaaatgctactattttgccatacttgcttcatacattctcctacctccctccctgtttccttccctccctcccttaattccttcccaagtaaacctttttataataagacaaagttttattaataactcagtaagaccgttttaactagacaaaactgtcggaggcaaagctagaataattcattaggaagaaattgctaaggaatgagcccctggctaagatttccttattagatggctcttccccttcaaaaacaagcttccatcagacagccagacagcacatctttcagtagagccagcacatgccaacccaaaataaataatttttctcccctaattcagggtttctgttctcaactagcaatgggcaggtgtaactaaagtaggccactgctatcagcagacatcttccatgctaccttcacctgtagctggccctaatatagaaaacagttttggcctaatttgtagttttttgttttgttttgttgagaccgagtcttgctctgtcacccaggctggagtgcagtggcgtagtctcggctcactgcaacctccacctcccgggttcaagcaagtctcatgcctcaatttcccaagtagctgggattacgggcatgcactaccacacccagctaatttttgtgggttcgtttttgtttgtttgttttttcttttgtttttgacatgaagtctccctctgtcgcctaggctggagtgcagtggtgcgatctcagctcactgcaacctccgcctcccagcttcaagcaattctcctgcctcagcctcccgagtagctgggattacaggcacccgccaccacgcacggctaattttttgtatttaaaaatacaaataattatttgtattgtttataataattacaatacaatataatattgtgctgtttcaccttgttggccaggctggtctccaactcctgacctcaagtgatccacctgcctcggcctcccaaaatgctgggattacaggcatgagccacctcacccaacctaatttttgtatttttaatagaagcaaggtttccccatgttggccaggctggtctcaaactcctgacctcaagtgatctgcatgccttgccctcccaaagtgctgggattacaggcatgagccaccctgcccagccgtaatttgtagtttaaaacctcacgctccctaggcttaacaacattgataattatccataattttgtctggcccttcctcctatcctgaaaaaagtcaccataaattactttttaattgtaatgttgtccctacatgtttagctagggggtcctcaaaaatgcttcctgctggaaaatattgttactgatgaggtattttttagaattctttattttttttaatgacaattttttttctcatccaatagtgtgactatttccataccactgaattttttcatttgtttagctagcacatactatatgcaaaataatgaactagagagtggaaaatttaaacccagtagtataataaaattaaggcataatttctgcactcaagtagattacagtcttgatgggtagaggtgggaacataagcaaaatttggagattaagaagatagcattccttcaaggtttaaaggttcactgtttatgtacataagtgacttctaggtttcaaattcaatcatgtctattaaaatatgctccccttatgggtccgaaggaagagaaaagcctatagaagggattactgttaaacttgcttcatctcaatgttgagtcatttgatgctttatagaaagtggtattaatgaagtaggtgttcactttaaacttacggcttgatctttttctaccctctgtttcttcttcactttgagttaaaagagttactagagaaaattaggagaaatagctgaattccaacctttatattacaacttaaattttcatgtcagttgtctaagatttggtctctatgtctgacttgtctcgtctcacagaaaatgaaatggttgatgtgaatgtggtgatggatgaagcaaaagcttttacaggtgagtcagaagtcatggtgagaagggcattcatttttaactaagaccttaatgctctatagagaaaaaaatgtaaatgtttttaaacagtagattttggctgggcatgtgggctcacggctgtaaacccagaactttgagaggctgaggcaggaggatcacttgagaccaggagttcaagaccagcctgaggcaacaaagcaataccatgtctctacaaaaaaaaaaaattaggcggacatggtggcatgtgcctgtagtcccaactacttgggaggctgaggcagctgagcccaggagttttaggctgcagtgagctatgattaccactgcactcctgcctgggagacagagcaaaaacctgtctcataaaaaatatatttaaatagcagttttctcttcagactattactaacatgctaaattgacacccctacaaatgtaacggttaaatgtttgtttcataatcttactctttgatttgggatttttcctgtagagacttatattatgtagaggtttgtttgttttttgtttgtttgtttgtttttttctgaaacggagtctcactcttgttgcccaggctagagtgcaatggcacgatcttggctcactgcaacctccacctcccgggttcaagcgattctcctgcctcagcctcccgagtagctgggattacaggtgtgtgccaccacacccggctaatttttgtatttttagtagagatggggtttcaccatgttggccaggctggtcttgaactcctgacctcaggtgatccacccacttcggcttcccagagtgtgggattacaggcgtgagccactgcacctggccggtaatttttttcataatttgaaatcattattctcgtcctaaaattcttatatgttaacaattcccatctttccaaaggagaaaaagttaatgtcagtaatctggggaatgagctgaggaaaatggggctcgtactcactgatgaggagcacgagaagctgctgaaaactctgccaattcgcagtgagtatttaccacatcctttgagacttggatttaggggcttgtgtgtgaaaacttcttaaattatacatgtatatgcccagtaaacctcctctagaaaacacagttatcacactaaaagacatcttggccagacgcggtggctctcagcactttgggaggccgaggtgggtggatcaagaggtcaggagttcgagaacagcctggccaacatggtgaaaccctgtctctactaaaaatacaaaaattagccaggcatggtggcatatgcctgtaatcccagctacacaggaggctgaggcaggagaattgcttgaacctgggagatggaggttgcagtgagccaagatcatgccactgcacttcagcctgggcgacagagcaagactccgtctctcaaaaaaaaaaaaaaaaatcttgttgcctgtttttgttgcttatattttaataccgaaagctagcaacatctttcaccgggggtgtcccaccatccgggctatattatcctgtccccctgggagcactgcctaatcttatcatgaccgatgagaaggaaaccagggaagaaagaaaaggaaggaaaaagacagaaatagggaaatactgtattttattcaaccagtggatagatttataacagggaaagtgttctttatctttggtttcattcttaaatgtaacagagaagaaacttccaagcaaattgaaaggggtttttttccctgaaattatggatgttgtgttgtctttgtgctgattttttagtcttcccatcatttaacccatattctgaattgtgtcttatcttacaactagtggaaaggtatataagaatagattgctcaaaggtgtgaaggccctcaacggtgagtaggaagcatggtggaagagcaagtaaaaaaattcctatgtttggtattttcttttaaatgttccaacttcgcttcctgccaatttactgattcattgttaggacataacttaccattcttctttggatgcattggccttttgggatataagttaaaaaatcatatcactataggaagtaaattagttgttgtttcaaccataagtcattagacttgcctgctcctttctattgacctctcagggaaaaccaaagcagaaccccctagatcaatattaagagaaataccctatctttccatactaacactgtgtaagtaattattatttcaattgttaattagaaaaagatgttttagaacactaaaataatacaagaaaactatgcaactctaaccactttaaaaaaaaaaactgatacagtctggcacagtggctcatgcctgtaatctcagcactttgggagaccaaggcaggcagatcgcttgaggccaggattttaagaccagactggacaacatagtgggacctcatctctacaaaaaattttaaaattagctgggcatggtgacacatacctatagtactacctacttaggaggctgaggcagaaggattgcttgagcccaggagttcaaggctgcagttccatcctgggctacagagcaaaactctgtttttaaaagaaaaaaagaaatgtaagttctcctatcttccacaaatcccctccccataaaggtaaatactgttaacaattcagcagttatctttctcaattctttccaacttttaactgacatatctaaatctaaggaaatacgcacacagtctgaggagatacacacacacacacacacatgttaataatttctttgtattcttgtactttaccctccaactggggtttctgatgcatgaccacgattaacatttttcactcttaaacaataacactcatattcttattccatgcccttctttcttaagggccaagggtcaaaacaaaaaaggtggagatttttttggaaaacatgggaactaaaatcaaggatgaggaacttgaggaactcattacccaactaccaactgagggtgagtattacaaatatctctatcctcttcagaaaaaccttaagcccttccattagaactgctgaaattagcctttttagcatcataatgaagtaaatgtaaaaacttaattctgactcttgatgaaataccatcttcaaaaatgcttttgaaaagatatgtcaggtatgccacttgaagcctcagtcatgcctgggaatgccacacacttaaggagctgaaagaaaaatgaattgaagagaacatttaagagaaaaattaagaaacctgaaagtcaaatgataaattagaaatgaatagttgcaagccaaagagctaatatccctaaggtagcaaaagcccttgtacattgataagaaacatactgataatagaaaaataggcagaaacacaaataggtaattcatacaagaggaaatacaatgtacatccccaaataacatatggaaagatgtttaacctcaccaatgatcatgaaaatgcaaaataaaacacagcactatcttcattcattggactggcaaaacttaacaagattgataatatttagttcttatgaaaatatgaggaaagggactaactgataaatttggggtgagagttgccactgctatatatactttttgaaaagtcacctgacagtgtctaaggggggaaagtcttctcttttccctggtgaatccagcctacgttcctcacgcagtatacattatttctttgtgctgggtcctggtccctgttttgccacagacttgctgacaaataatttaaccctacttaatcttagtttcctcatatgtaaaatatcttcaagttgaactaaatgatgctctatgattacttcttgctctgaaattaatatatgtaatgcatgtaatgcagtctagaatagtcagtaaatgttagtgatgacggatgatggtgtggtggtgatgatgatggggaagatagaaaagttgttaaagagcagaacaaaatgagaggcgctcccagatggccaaataggaaaagctccagtctgcagctcccagtgtgatcgatgcagaagatgggtgatttctgcatttccatctgaggtacctggttcatctcattgggactggttggacagtgggtgcagcccacagtgggtgagctgaagcagggcagggcatcacctcacctgggaagcgcaaggggtcaggggatttccctttcctagccaagggaagccttgacagactacctggaaaatgggacactcctgcccaaatactgcacttttcccaaggtcttagcaactggcagacaaggagattctcacccatgcctggctcagcaggtcccatgcccacgaagccttgctcactgctagcgcagcagtctgagatcgaactgcaaggcagcagcctggctgggggagaggcgcccaccattgctgaggcttgagtaggccaggaagctcaaactggacagagcccaccacaggtcaacaaggcctactgcctccagactccacctctgtgggcagggcatagctgaacaaaaggcagtagacaacttctgcagacttaaatgtccatgcagacatggacgtccatgcagctccgaagagagcagtggttctcccagcatggcgtttgagctctgagaatggagagactgcctcctcaagtgggtccctgacccctgtgtagcctaactgggagacacctcccagtagggaccaacagacacctcatataggcgggtgcccctctgggatgaagattccagaggaaggatcagggagcaatatttactttctgcaatatttgctgttctgcagcctccgctggtgatacccaggcaaacagggtctggagtggaccctccagcaaactccaacagacctgcagctgagggacctgaatgatagaaggaaaactaacaaacagaaaggaatagcgtcaacatcaacgaaaaggtcatctacaccaaaaccccatctgtaggtcaccaacatcaaagaccaaaggtagataaaaccacaaagatggggagaaaccagagcagaaaagctgaaaattctaaaaaccagagcacgtcttctcctccaaaggattgcagctcctcaccagcaactgaacaaagctggacggagaatgactttgacaaattgacagaagtaggcttcagaaggtcagtaataacaaacttctccgagctaaaggagcatgttcgaacccatctcaaggaagctaaaagccttgaaaaaaggttagacgaatggctaactagaataaacagtgtagagaagaccataaatgacctgatggagctgaaaaccatggcacgagaacttcatgatgcatgcacaagcttcaatagccgattcgatcaagtggaagaaaaggtatcactgattgaagatcaaattaatgaaataaagtgagaagacaaggttagagaacaaagagtaaaaagaaacaaacaaagcctccaagaaatatgggactatatgaatagaccatatctatgtttgattggtgtacctgaaagtgacggggagaatgcaatcaagttggaaaacacccttgagaatataatccaggagaacttccccaacctagcaaggcaggccaacattcaaattcaggaaatacagagaacaccacaaagatactcctcgagaagagcaaccctaagacacataattgtcagattcaccaaggtggaaatcaaggaaaaaatgtgaaggacagccagagagaaaggtcgagttaaccacaaagggaagcccatcagactaacagcggatctctctgtggaaaccctacaagccagaagagagtgggggccaatattcgacattcttaaagaaaagaattttcaacccagaatttcatatccagccaaactaagcttcataagtgaaggagaaataaaatcctttagaaacaggcaaatgtggagcgattttgtcaccaccaggcctgccttacaagagctcctgaaggaagcactaaacatggaaagaaacaaccggtaccagacactgcaaaaacatgccaaattgtaaagaccatcgatgatgggaagaaactgcatcaattaacaggcaaaataaccagctaacatcataatgacaggatcaaattcacatgtaataatactaaccttaaatgtaaatgggctaaatgccccaattaaaagacacagactggcaaattggataaagagtcaagacccatcagtgtgctgtattcaggagacccatctcaggtgcagagacacatataggctcaaaataaagggatggaggaagatctaccaagcaaatggaaagcaaaaaagaaaaaaaaaaaaaaaaaagcaggggttgcaatcctagtctctgataaaacagactttaaaccaacacagataaaaagagacaaggccattacataatggtaaagggatcaattcaacaagaacagctaactatcctaaatatatatgcacccaatacaggagcacccagattcataaagcaagtccttagagacctacaaagagacttagactcccatacaataataatgggagactgtaacacctcactgtcaacattagacagatcaacgagacagaaggttaacaaggatatccaggacttgaactcagctctgcaccaagcagacctaatagacatctacagaactctccaccccaaatcagcagaatatacattcttctcagcaccacatcgcacttattctaaaattgaccacataattggaagtaaagcactcctcagaaaatgtaaaagagcagaaatcacaacaaactgtctctcacacgatagtgcaagcaaaatagaactcaggattaagaaactcactcaaaaccacacaactacatggaaactgaacaacctgctcctgaatgactactggataaataacgaaatgaaggcagaaataaagatgttctttgaaaccaatgaaaccaaagacacaacataccagaatctctgggacacatttaaagcactgtgtagagggaaatttatagtactaaatgcccacaagagaaagcaggaaagatctaaaattgacaccctaacatcacaattaaaagaactagagaagcaatagcgaacaattcaaaagctagcagaaggcaagaaataactaagatcagaacagaactgaaagagatagaaacacaaaaaaacccttcaaaaaatcaatgaatccaggagctgattttttgaaaagatcaaaaaattgatagaccgctagcaagactaataagaaaagagagaaagatcaaattgatgcaataaaaaatgataaaggggatatcaccaccaattccacagaaatacaaactaccatcagagaatactataaacacctctatgcaaatgaactagaaaatctagaagaaatggataaattcctggacacatacaccctcccaagactaaaccaggaagaagttgaatctctgaatagaccaatgacaggctctgaaattgaggcaataattaatagcctaccaaccaaaaaaagtccaggaccagacagattcacagctgaattctaccagaggtacaaagaggagctggtaccattcttctgaaactattccaatcaatagaaaaagaaggaatcctccctaactcattttatgaggccaacatcatcctgataccaaagcctggcagacacataacaaaaaaagagaattttagaccaatatccctgatgaacatcgatgcaaaaatcctcaataaaatactggcaaaccaaatccagcagcacatcaaaaagcttatccaaaacgatcaagtcggcttcatccctgggatgcaaggctggttcaacatacgcaaatcaataaacgtaatccatcacataaacagaaccaatgacaaaaaccacatgattatctccatagattaagaaaaggccttcgacaaaattcaacagcccatcatgctaaaaactctcaataaactaggtatcaatggaacgtatctcaaaataataagagctatttatgacaaacccacagccaatatcatactgaatgggcaaaaactggaagcattcctttgaaaactggcagaagacaaggatgccctctctcaccactcctattcgacatagtgttggaagttctggccagggcagtcaggcaagagaaagaaataaagggtattcaattaggaaatgaggcagtcaaattgtccctgtttgtagatgacatgattgtatatttagaaaaccccattgtctcagcccaaaatctccttaaactgataagcaacttcagcagtgtcaggatacaaaatcaacgtgcaaaaatcacaagcattcctatacaccaataacagacaaacacagagccaaatcatgagtgaactcccattcacaattgctacaaagggaataaaatacctaggaatccaacttaaaagggatgtgaaggacctcttcaaggagaactacaaaccactgctcctcaaaataaaagaggacacaaacaaatggaagaatattccatgctcattgataggaagaatcaatatcatgaaaatggccatactgccaaaagtaatttatagattcaatgccatcccaatcaagcttccaatgactttcttcacagaactggaaaaaacgactttaaagttcatatggaactaaaaaagagcccgcattgccaagacaatcctaagcaaaaagaacaaagctggaggcatcacactacctgacttcaaactatactacaaggctacagtaaccaaaacagcatggtactggtaccaaaacagaatatatagaccaatggaacagaacagaggcctcagaaataacaccacatatctacaaccatctgatctttgacaaatctgacaaaaacaagcaatggggaaaggattccctatgtaataaatggtgctgggaaaactggctagccatatgtagaaagctgaaactggatcccttccttacaccttatacaaaaattaattcaagatggattgaagacttaaatgtcagacctaaaaccataaaaaccctagaagaaaacctaggcaataccattcaggacataggcatgggcaaggacttcataactaaaacaccaaaagcaatggcaacaaaagccaaaatagacaaatgggatctaattaaactaaagagcttctgtacggcaaaagaactaccatcagagtgaacaggcaacctacagaatgggagaaaatttttgcaatctacccatctgacaaagggctaataagaatctacaaagaactcaaacaaatttacaagaaaaaaataaacaaccccatcaaaaagtgggcaaaggatatgaacagacacttctcaaaagaagatatctatgcagccgacagacgcatgaaaaaatgctcatcattactggtcatcagagaaatgcaaatcaaaaccacaatgagatgccatctcacgccagttagaatgacagtctaactttttaataagttttaataagacagactttttaataagtcaggaaacgacagatgctgaagaggatatggagaaataggaacacttttacactgttggtgggactgtaaattagttcagccattgtggaagacagtgtggcgattcctcaaggatctagaactagaaataccatttgacccagcaatcccattactgggtatatacccaaagaattataaatcatgctactataaagacacatgcacacgtatgtttattgcagcactattcacaataggaaagacttggagccaacccaaatgtccatcaatgatagacaggattaagaaaatgtggcacatatacaccatagaatactatgcagccataaaaaatgatgagttcatgtcctttgcaggaacatggatgaagctggaaaccatcattctcagcaaactgtcacaaggacagaaaaccaaacaccgcatgttcttactcacaggtgggaattgaacaatgagaacacttggacacagggcggggaacatcacacaccagcgcctgtcggggggtggagggctgggggagggatagcattaggagaaatacctaatgtaaatgacgagttgatgagtgcagcaaaacaacatggcacatgtatgcctatatatcaaacctgcatgttgtgcacaggtaccctagaacttaaagtataataataataaaaaagaacagaatgaaaaagaaaggaaattctataatctattaatcaatttttcctgttatgaaaatatttcctaacaatacatatttattattacttttatataaataataagacaatatgtaatttaaaacctcttataagaaatagcattgggatcactgtcttccttctctcctactcctgtccttgttcttcaaaatctttcatatagatcaagggcttttgactttgtgccatgacccctctgtaaatccgctgaatggaccacttccgagtgtaatgttttaaaatgtataaaataaaataataggattacaaagaggctaattgtattaaaatataatttatcaaaacattaaaatataaattattagtatttattaaaacatttaacactttctagtagcagatcaattttttttttttttcgagacagagtcttgccctgtcacccaggctggagtgcaatggcgcaatcttggctcagtgcaaccaccgcctcctgggttcaaatgattctcctgcctcagcctccccagtagctgagattacaggtgcacaccaccatgcccagctaattttgtatttttagtagagatggggtttcaccatgttgtccagagtggtcttgaactcctgacctcaggtgatccacctgccttggcctcccaaagtgctgggattacagggagttaaaattatttttataattttaaagtaatgatgaaggccaggtgcggtggctcacatctgtaatcccagcactttgggaggccaaggagggcagatcatttgaggacaggagtttgagaccagcctggccaacatggtgaaaccccatctctaccaaaaatacaaaaaaaattagctgggagtggtggtgcatacctgtaatcccagctactagggaggctgaagcaggagaattgtttgaacccaggagacagaggttgcagtgagccaagattgcaccactgcactccatctcaaaaaaataaaataaataaaatataaagtgataataagcacgagcaacatttcaacatatttggaacaactatattatgatttgaaaatgtcagtgatttctattagtgacaaagtcacaacttatgccactattcttaggtttattgccttcattaataattgaagaaaataataaatttaagttaatggttagtgaaaagaaaaacacacttttggccaagcattgcggctcacacctgtaatcccaacactttgggaggcaaaggtgggaggatcacttgaggccaagagttcaagatcagcccaggcaacatagcaagaccctatctctattaaaaaaaaaaaaaaaaaaaaaaaaaaaaggccaggcacagtggctcatgcctgtaatcccagcactttgggaggctgaggcgggcggatcacgaggtcaggagatcaagaccatcctggctaacacagtgaaaccccatctatactaaaaatacaaaaaattagccgggtgtggcgacgggcgcctgtagtcccagctactcaggaggctgaggcaggagaatggcgtgaacccgggaggcggagcttgctgtgagccgagatggcgccactgcactccagcctggacaacagagcaagactctgtctcaaaacataaaagaaaaaagaaagtctttttttcccattccagctcaagacctccctgaattctggcaatacagggtcaatagacccaggttaaaaactgatacaggtcacccatccaatactctgacctcttgttccttgatatctttaacttcagtcatttttttcctcccttccatcttgattaccactcacatagtaatgacctagaacttgtccttccctaatactccatcacctccaaaatttctgttgcatagactcactctctaacctttttccttccagttcatttactatgcagacatttttgccataacaccacataggaattcctgaaaaacctcctgttctgtaaaattacccactaaagtaatggagcttatggagaaaattctggaagcacgttcaaaatctatgccagcttgtaaccagaacagtaccaaaagcacaaggaaacttgtacagcccaggcaaatagcacagagcagctgtaagatatttaaaaatgggccgagcacggtggcttatgcctgtaatctcagcactttgggaggccaagatgggtggatcacaagatcaggagttcaagaccagcctggccaagatggtgaaaccctgtttttactaaaaatacaacaaattagtggtggcgggcacctataatcttagctactcgggaggctgaggcaggagaatcgcttgaacccaggaggcggaggttgcagtgagccaagatcacgccactgcactccagcctggatgacagagtgagactccatctcaaaaaaaaaaaattaaaaatgcatacacacacacacacacacacacacacacacacacacacacacacacaccaaaaaaggagttaaagagctggcttgccattctgaaatagtgtagatggaagtagagctctgagccagtgaagctggttcccccttctgcatcacgggcactaattttttaattttattaaaatatggaacagaaaggctccagccgtagctccaacctaagattttttttcttgcttgctgaagaaaagaattcccttcttatttaggaaaaattacgtatgaacaaacacactgttcacattactgtgacattattccatttaccaattgaatatgatgaaacagtgctactgaatcatatgttgtaccagaacagagtatagaactccaactccagctattccagccatgtggagaccttcatgcctttgaccctactattcttttattattcaacaaccccaccaccacctctcttaattttctcccttccttaaattagattcactgcctcaacatcatataagcttacaaactctctgaacttcaaatttccttggcaaaaacttggccatctttttactccatgcttacccctgaacagcttaacattgctggagaagatcacaaagccatgctaatagaactcacttcacataatgggcagaaacttcaagttagcccttaacactgccaaaaaagtccctgctacgttttccaagtaacttcactttcttactctcagagacaatttcacaccttctctgtccaaatttccagtgtctcctcacctcaactctcaactgatgatgtcacctcaaacttcatagagacaatagatgcagttagagaagaaagacctcattttcctacctccgtttctatgaacctatgtatacctatgccccatgccctgccttttgtcttactagaaaggggaaagaatgctcctttcatgggccagcctttccacttgcaccctggatcctatttcctcttgccttctcaaaaacttaactcctgcaatatttcccctttcctgcgtcatcaatttccccctctctgaagtatctctatctatatttctcttgacatgcagctatgcttttctctcacacttgctccctcctagctaccacatcatctcttggttcctctgcacagcagagttgcctcaaaaagttgtcattactcgtcgtttccatatcctcgcctcccattcacccttcagcattctccaattaggtgtttatctccacaatggcaccaaatgagctctcaacaagactgtcaacaatctacttcttgccaaggctcacagtcaactctttgttcttattttacttgacatcttagcagcatttgacataagtggccaccccctttttattaaaatacatttttcagccaggcacggtggctcatgcctgtaatcccagcactttgggaggccgaggcaggtggatcacttgagcccaggagtttgagaccagcctaagctacatggtgaaaccctgtctctacaaaaaataaagtaactatcccgctgtggtggcacgtgcctgtagtcccagctacttgggaggctgaggcagggggatcacctgagcccgggaggtggaggctgcaatgagctgtgattgtgtgccacttcactacagcctgggtgacagagcaagaccctgtctcaaaaaaaagaaaaagaaatgtgtttttctctagacttttaaagccccatactcacctggttttcttcttccctcactgacattttcttctcggttttctttctgactgttcctcccctgcaagatctctaaataatgaagtgacccagggttagacccttggctgtctttttatctacactctcttcttaggagattgcatttagtctcattgggtcagataccttctctaagctggtagagtaaacttatatctctagctcaatttccctaagtcagcaatagcatatcaaactagttatttggtatctccacttgaatttctaaaagtcatcaccaatttaatggaattattggttaattctcctaaaatatctcaagtcctccccaagtcagtaaaggcatcccatccaccctgttgattggggatggtagactaggtttcatctttgatttctccttccttcatatcccacatttaaatctaggttcatcaacacctgtgaaaagaagggaaaacaaaatttcgaaaaagaaatctaggttcaaactgaaaaatacatcctgaatccatcacttgtcactatctccactattgcaactacatcccaagccactgtcatctctttacggggccagtgaaacaggctcctctctggtctccattcctccagtttccttatcctatccacaccagccagagtgatcttttgaaagctgcaatcaggtcaagtcactccagttttctgaggcctccaatgacattccattgcaatcaaagtaaaatgcagactttatcatcatgctctacaaggccctgcatgatctggcccctgccacactgaccttctctgtctctcgatcatggcaaattcattcccaccttaggactgttgcatatgctgttcttctactaggaatgctcttcccccaactcttcacatggctactcatttctcatcattcagccttcaacccaaatagaccctgctctgagaggcctttcctgacctccctgtctaaatcaatcccatcctctattactgtttattatgttgccctattttatttttgatagcatcttaacagtacatcaaattatcctttttgtttttatgtttattatctgtctctctcactacattgtacactccttaagagccagaactctgtcaccttgcctacttttgtatccccaaagcctatccaagtgcctggcacctagaaggtgatacataaatagctgttgattaattgactaaataaaagtacatagggtcagagtcgtttatcctctctctatgcttaactgtaaccaatcacttcttaatttagaccactctggtggtctctaacacaaagaaaaacaaaaaatttgatagatttgtcacaattaaagctttctttgtttctaagataacactcttatctctgaggataagtccatacaattctaaggaaaaatttaaagattagtaaattctggctgggcatggtggctcacacctgtaatcccagcactttgggaggccaaggtgggtggatcacttgaggtcaggagttcaagaccagcctgccaacatggtgaaaccccatctctactaaaaatataaaaaattagttgggcgtcgtgacgtgcacctataatcccagctactcgggaggctaaggcaggagaatcacttgaacccgggaggcagaggttgcaatgagctgggatcataccactgcactctagcctacgcaacagagtgagactccacctcaaaaaaataaaaaaaaagaaaaagattactgaattcttatgatcttcataacttcagaacttcacacagcattaatgttgagggtctcagtaacatcagttcatctgactctggggtatacttttcttgccttacaggtgagacagcagttgacctgaatgacttaatggatgctgtcagttacatcaagggtgagttgcaagctataatggaaagatgttgtaagtaatatcttaatatttgctattaatgttggagaagaatattttctattcataagtgttcagatttttcatataacgtatgttccatttttgtagatgctgctgaagttgagtaagcaccagcatggcacatgtatacatatgtaactaacctgcacaatgtgcacatgtaccctaaaacttaaagtataataataaaagaaaaaaaacttaaaaaaaaaacaataactaatctgtatttatatatcagtgcccatactagtctccaaaattttcagcaaaacagttcttcaaagtagtaatagatatcaagagccacagaactattcatacccttttccccactaaccccagtcttagaaatttatcctttaaaaatagtttcattctcataattgtgagaaaattgaaacagattagaaatatctaaccatacaggaattactacataaaccatggtatgtcagtttaatgggataccatgttaaaatgctagctgtaaagattatatggcaacttggaaacatgtttatgaaggaatgattttaggttggaaaagcaaaatacagaagtgtacatgtattagatttccacattgtaaaagtaaagccttattgccaagaccaaaatggaatatcaaaaactaaaaatggttcctgtgttagagtgatggaattctatctttcccctgttacattaatctgtaatgttgttacataaaactaagtccctatatgtactttaatgtgctgtggattttgcaacaacccaccagtcaattcctaacccctggttactttcttctttgtagccactttctgattctttcaatcagaattaaagatttttgtttctgattctcctattctggatgataatgtatataagcacagatagtgttctttgtcctttgcaaataattctgtaatatttttgcaattcatttctcaccctttctaaggagaggtgattgatgtccagaacttagacaatttctagcaagcgaagggattgagctcacagaagaagaaatgaaggagttgatgcctcatttgacatttaacggtgaggtgtatgttttataattatgttaccttcttagaagtgtatttttgggctgggcatggtgattcacgcctgtaatcccagcactttgagatgccaaggcaggtggatcacctgaggtcaggagttcgagactagcctgatcagcacagtggaacctcgtctttactaaaactacaaaaaattaactgggcgtggtggtgggcacctgtaatcccagctactcaggaggctgaggcaagagaatcgcttgaacccaggagggggaggttgcagtgagctgagattgtgccattgcactccagcctgggcaacaagagcgaaactctgtctcaaaaaaaaaaaagaagaagtgtacttttgtcatcctgtacataacatcctcagaaatgatccttatctttgtaacacctagaacatagcttcccaaacttaaacgtgcatatgaatcacttggtcgtcttgttaaaatgcagatttgggggccagacgtggtggctcacacctataattccagtgctttggagggctgaggcaagaggatctcttgaggccaaaagctcaagatcagtctgagcaatagactgaaaccctgtctctacaaaaaaaaaaaaatttaattatccaggcgtgatggcacatgcctatagtcctagctaattgggaggctgaggcaggacaatcacttgagcccaggaattcgagattgcaatgagctatgattgcaccgctgcattccagcctgggcaacagggcaagaccctgtctccttaaaaaaagaaaaaaaaaaaagagcagattttggttcaagaatagggtagagcctgagattctgccttcctaacaagctctcaggtgatgccaatgatgctggtgcatgagccaccttttgcctatcaaagacctaaaagatgaaaaaaagacatgatatgttaagattgtgcctgacttgccgggcgcggtggctcacacccgtaatcccaacactttgggaggctgaggcgggtggatcacctgaggtcaggaggtcgagaccagcctgaccaacatggtgaaaccccgtctctactaaaaataaaaaaaaaattagccgggcttggtggcacacgtctgtaatcccaggtactcaggaggctgaggcaggagaatcacttgaacccaggagggggaggttgcagtgagccaagattgcgccactgcactccagcctggtgacagagtgagactccgtctcaaaaataaaaaatgaaaacaaaagattgtgcatgactttcatttcttaaatcacaaatacaaccaatatgctaagttgtgcctgatggtatgattccagcctgaaaaataaggaaaaatattacagcgagtgaaactagaaaataaaatgagtattaggaagagatacacaggggaaggagggggaatttggggttgtttgtttattgaaattttattattgtttattgagtctatttacatggcttactcactggcccttgtgctatataaatacttttttatttctaccactttcttttttgttctgatatcccagaaaaagatgttctaagtgcatcggaggataacgtttcttactataatgcttcagtgatgttgtcagagagtttccattcagcctggccttgaatttaaaagagtatattgatttattcaagcaacaaatatttattggtcactgaatatgtcaggccctatactaggtactaggaatacaaggatgaagaaaggagacatacttcgctttctctacgaagcccaactgaaagtaggagatgagacactgaaccattaggtttctcaaatcatggttttatggcaataaatttgaaccaatccgttgcaaacatatctccatgttctgttctctctagtttttcatttcttccttttttgcctatattttcttcctcttctctcttcagttgaagagattttgttttttgttttggggacagggtctggctctgtcacccaggctggagtgcagtggcatgttatcagctcctgggctcaaccttgcaacctccgtctcctgggttcaagctgtcctcctacctcagcctcccaagaagctgggactacaggcacacaccaccatgcccagctgatttttgtattttttgtagagacggggtaccaccgtgttgcccaggctggtctccaactcctgggttcaagtgatctgcctgcctcagcctcccaaagtgctggaattacaggcgtgaccaccgcgcccggccagttgaagagattctttacaacccttcttaatccactactcttgatctcatctactctctttccaaaaattactcctttaataattcctttccaacatattcagtttcatttatctctctgtatcctgcctctaaaaaggcagattgccttcagatcaacctttacatagcaatggtcagaaaccttcatgactctttcctatgttcccaaaaaagtccaaacaaaacccacggcaacatagcccccatgtacttctcagctttctcctccactacttccaacatgtcatgctccaaaccaactgaactacccacagttccctcaaaataccttgttccttcttatttttgtccctttgattaatacaatttcctaaagcacagaaaagatgaactgctttttaaaaagcagagatagggccaggcacagtggcttaagcctgtaatcccagaactttgggaggctgaagtgggtggattgcttgagaccaggagttcgagaccagcctggccaacctggcgaaaccccatctcactaaaaataaaaaaaattagctggcatgatggcacatgcctgtgatcccagctacttgggagtctgaggcacgagaatcacttgaacccaggaggcagaggttgcactgagctgagatcacaccactgcactccagcctgggtgacagagtgagaccctgcctcaaaaaaaaaaaaaaaatgtagaaataggtatctctttcaaagactcatccttgccaggcacagtggctcacacttgtaatcccaacactttgggaggccaaggcgtgaggatcacttgaggccaagagttcaagaccagcctgggcaacatagggagacccccatctctacaaaaaaaaaaaaattgtttaatgagctgggtgtggtggcacacacctgcagtcccagctgctcaggaggctgaggtgagagtatcgcttgagccagggaggtcaaggttgcaatgagccataatcacgccatgcactccagcctgaaggacagagccagacagagccaaaacaaaagttcatctttttttttccatcatattcacctgacagaaaaatgaatccaaattccaaagcaaaccaatgtttctagttcttctaactcatggaagaatttcagcctattatattgtttttaataatttcacaactgttatgaatttttatgtgactgcctctgtatctaaaccaaaatgttttacaggaaatggaaagattaatgttaattcaataatggagggcctgaagaagtttaaacgtaagtgaaaatttattatacaatataaaattataatctgatgctatatgtgtatttttatctgtgttttcttggttataaaagtaatatatgttcattatagaaaatttctatatttagcaaatgaaaagatgaaaaaaggaaattttaataattcttaattctatcctccaatgataatccataattttatcaccacaaattttttccttatgcatacataatttctgtgcttttttatccatgtccaatgtatttacattcccttttcttactcatattaaaatcttacttttttataaatatagctaggccgggcacggtggctcatgcctgtaatcccagcactttgggaggccaaggcgggtggatcacctgaggtcaggagtttgagaccagcctgaccaacatggtgaaacctcatctctactaaaaatacaaaaattaactgggcgtcatggtgcgtgcctgtagtcccagctactcgggaggctgaggcaggagaatcgcttgaacctggaaggcggaggttgcagcgagccgagattgtgccattacactccagcctaggcaacatagagagactccatctcaaaaaataaataaataaatatagctaataatctaaagttcctttctggatgcctctgaaatttaatacataatctcagtactttttggttgtaggccccttatatttaattatttctaaaataagtttcttattgccaaaatgccatgttccaaatgaatgggagatttgaacattatgctgtgaaattgatcaacagaggcaaggtaaaacttgtctctgccctcttcccacacacgtacaacctcaatcttgagttcatttttaagtaatcttgatttattctctgcatctgcattcctaacaagtgcgacaaaaaagaaatttgctgtgtctctgcaagcctgactgtgtttcaaaaaggaggatgttgcagggcatggtggctcacttctgtaatcccaacaatttgggaggccaagacaggcagattgcttgaggccaggagttggagagcagcctgggcaatatgacaaaactccatctctacacaaaattacaaaaattagccatgtgtggtggcatacacctgtagttccagctactcaggaagctgaggtcggagaattgctcgagcccaggaggttgaagctgcagtgaactgtgattgcaccactgcactccagcctcgatgatagagtgagaccttgtctgtaaaaagaaataaaaaaggaggatgtaagaataatttaaggtatattatgcaagtatccacaaaatgaattttaatagaaaataaatttaaattctgggtacccatgcctaatatttccaagttagtcctgttgtattttatttgtaaaagaaaaaatatctaccttttaataagcccagtctatcccatctattgctgcttttgttgttggtgccagaaaactttcaggaatgttcacttggtagtttttatccccagcctttaaaatcatactgccaattggagatactggaaaccatctcccatggccatgtataagttctatgttcaccaataagtattttttgagcacccagacactgttcaagaaagtttagcaatgaccaaaagataaagcaaggttcccactctcacaaaagcttagtttttgagtacacagtatatgctcaataaatacttgttgattacctgatagaggttctagtctcctgctttcagataattgaagattcactaactgaagcagctgtatcaaggtcattcttaagataatccctcctatctgggcaactcagaacaaacagttctgtaaaactaaccccaggtaacataaacgagtcacccatatcagaattggctcttaaccatttataaagccaggaaggcacaacacttcagatatctttgcttacttttctatcattcttctttctcctcttccacttcttcttttttcctcttttattatcttctccatatctctaaaaatatatttttttcttttgctccagcttccccttgtttttctagtgctattctttctttttcttccagtctctttatcaaacatatacatttcacatggctacccagctcgcccacatgttttcttcacttcataagccccaatccacctactgccactgaaatatattttattctgtgaagtctacagtgccttaaagaaaatttagatgttttaaagtatgtttcatatttttagaaatttcaaatactggtttctatttcaaagattcactcaataatactacattttcacttataaagttttctttggctgggcacggtggctcacgcctgtaatctcagcactttgggagaccgaggcaggtgaatcacttgaggtcaggggttagagaccagcctggccaacatagtgaaaccccgtctctacaaaaatacaaaaattagccaggcttggtggcacactcccagctacttgggaggctgagacaggagaaccacttgaacctgggaggcagaggttccagtgagccgagatcgcaccactgcactccagcctgggtgacagagcgagactctgcctaaaaaaacttttaaagaaagttttctttatataagtattaagggacaaattttatttcttaatgccatattgacacatttgccttcaaatatactactgtgatttaagtcttcacactcaaatttcagatgacagacataggcataatggcaatggcatttttcacacttaaatatctttttctcccatttccatttcaccatttctactttctaaagaataaaggtgaatttcagctacctaagcgtgataacgtggaaataacattcatatatgaacaacttcaagacctgctaaaatttatgttatttgatggtgaacattcagaacttcactctggccttcagaggcactggggttgtaaggttccacatgagaatttctaaaactttacttactagggacacagagaaagtctaacatacatttagaaaaaaagtcgccatataaaaataaagtctgcttcttgtcatcttctaagtcacattctcaaccatcatgttgccacgtgcagtgtctaagaatggcatagggtgcctctagcaaactaatatccaggaagggagaagagccaagcaatagagagagagagagagagtgaccagatcagaggcaggaaaagaaaagctgcttcataggtgtaggtttttctgaattctacagattatgtgtttcatattagaattaatcctttccccataggaaagatatttcttctttatatgtattgctttctgcattatatattaccttatatagcctctataacctaaagggatcaccaagcattttccatgtttctgtgtttcatcatctgccatggaccttttttgatattaaaataatacattattggtttatctggccaggccaaaccaaaccaaacataggaaactgagttattatagccacacttttttcctgagtattaatctcctcatgcttagaaaacaaaactactcccacatttttagaggaaagaaaagaaaaaaagttaaatctgtactattaaggttttgattggttgttgttctggccatagaaaggggtggggtgaagggagattttgcagttagttaattatacccacatatttgataggataattcactagaaagaaatatctatctcattaaaaggtatctaattagtcaataccttcctaaacaaagcattcatgaaaatgaagtgggtaacagatcatcttcctcctgaatcaacagattttcaaagtcattccacttctttacatcctaaaagatgataaatgaatagtcttgatttcaatgctgacactatagtgcttttcaatttttgcttttggagtgcaatgcattaaggcaccaaaagaaacaatatgaaagatggatatcccatataaccttgacattttcttaattttttcactcatctggggaaaaaaataagataaattatgccctcctagtctactttccataacttcagaaattcatgtaattttgattcttaatcttgtctttaagcaaaaggaatggtgactctgcataagttgaaaactgcaaatgatattaaaggtgagtgtgaaagctgatgtgaagccattgtaaagatggggcttaatactttgacttacattttttaataccttagttactttccctaattgtcttgtcagtttctatcctccatctacttgtccataaagtgaatgaacaccgttatctctccaactttctttctaagttccttgtacctttatagtccacaccacactgaatcacatgtgattatcaggtattttatattcttttctaatgctccatttatgatttttttaacctctaagaacactgtagcctatttggtatcacagtacaatttacaaagcaggtgttcctgactctgccattaaggaaattaattcagttcattgggctttagtgtccttagcagtaaaataaaatgggtgaggacctggagcactggctcacacctgtaatcctagagccttgggaggcggaggcaggaagatcacttgaagccaggactatgagtccagcctgggaaattcagcgaggccccctctctataaaaaattttaaaattaatcagttgtagtggcacttgcctactgtagtcctagctactcgggaggctgagtggaaggatcacttgagcccaggaattggaggctgcattgagccatcactgcaccaccgcacttcagcctcagctaacaaagaaagaacttgtctcttttttaaaaaaaatgaaatgggcatggacacagggaggggaacatcacacaccagggcctgttggggggtaggggggtggggggctaggggagagatagcattaggagaaatacctcatgtagattacaggttgatgggtgcagcaaacccgcatggcacgtgtatacctatataacaaacctgcacgttctgcacatgtgtcccagaacttaaagtataacaaaaaaaaaaatgtggtgggttgggggcagaattaggttgatgatctattagttatctttcagctttaaaattccaggactaacttctgtggctgaaagaacattatcaataaagtaaaaagacaacccacagaatagggaaaaatatctgtgaattatgtaattgataaggatctagtctccaaaatatataaagaatgctgtaacacaacaataaggctgggcatggtagctcacgcctgtaatcccagcactttgggaggccaaggagattgctgggggccaggatttcgagaccagtctgggcaacatagtgaaacctcatctctaccaaaaatacaaaaaagtagctgggcatggtggcctgcaccttgtagtcctggctactggggaggctgaggtggaagactcacttgagcctgggaggtcgagactgtagtgaaccatgatcctgctactgcactcaaccctgggcaacatagtgagacctcaccaaaaaaaaaaaaaaaaaaatctaagtaagtagcctttaatatagtaggctcttagtaaataattgttgaattaatttataaattaagccttccctttctttccttgtgtgttcctgtccagaatgggaggcagtgtaccaagcttaaaaagattaggttaaagtcaaattatgctcataatgaacaaatccccctgagcaggaataggaaacctctagaactgctgcaagtgaaacctgaagcacttttaggggcccaactatataactagctaagccttgggtgccagagatatctgtacttagccatgatagactaaagacactcctaactcctgcgctagagtatttataatgccatgagacatgtcagatcatgaataccttggtttctgcttaaaacaatcttttctgtaattgttcttttgaaagcacttttcccaataatactaaagacagcctatgagagtttttttgcctctctttctaggcttaaacaattaatgaaatgattcttaatcaccattcagtgaaggcagctgagtaaaatgttttaattgaacaactttcaactgactgatgaagactttctctttttttctgagacaaaagtctcgctctgtcgcccaggctagagtgcaggggcgtgatctcagttcactgcaacctctgcctcccaagttcaagcaattctcctgcctcagcctcctgagtagctgggattacaggtgtgcaccaccacaccaagctaatttttgtatttttaatagagatgagggtttcatcatttggccaggctggtttcaaactcctgacctcaggtgatctgcccgcctcggccccccaaagtgctgggatcacaggcatgagccaccacacccagcctgatgaagacattaacatgaaaatatattaatatagaacttgaaacaaaaattctcccccttccctgaaattccaacagtgtcaaaatgttcagattttataaatcataccctcatatacaccaagggtgctgaatgaaccacactgaaaacacacttgctgtaaggttggaaggagctcctgggtcattctctccctaggcttgagcctgagcagtgaatgaggtcacagttgtgtgatggaacaaaccctttattggattcctgatctgattgaagcccagaagtggtaggtagcacggcttaaaagtaggtaaatatcgtgattttgtaggattctatgctaagtcctttttaaaaaatctattatctatgagaattgaaggtatttttttaaagaaatgattattttgaggtatggggatgatttcacagcacctttcaaatgcctgaattgttgagccattctggtgttcccagctctgtggcaggttttcagattttgaggacttgtaattgagttgtttagaaacaactgctttctgggctctgaggtggagacctgggaaaatggatcaaattctaaccaaacattcagagactttttttcctcatggttggatagtattcaattatccattattcctaagtcagcaacctagttttcttgtcagtgaactatcaaatacactctacatttttttattattattatactttaagttttagggtacacgtgcacaacgtgcaggttagttacatacgtatacatgtgccatgttggtgtgctgcatccatcaactcgtcatttaacatcaggtatatctcctaatgctatccctcccccctccccccaccccacaacaggccccagtgtgtgatgttccccttcctgtgtccgtgtgttctcattgttcaattcccacctatgagtgagaacacgcggtgttcggttttttgtccttgcgatagtttgctgagaatgatggtttccagcttcatccatgtgcctacaaaggacatgaactcatcattttttatggctgcatagtattccatggtgtatatgtgccacattttcttaatccagtctatcattgttggacatttggcttggttcaaataacaagagagggggaagccctaccaacccagcttctggtccataagccctgtttctcaaactatgccaagtggaaaggcgacggtaattcacaagttccttccggggtctagggtagcagaactgcattgtatcccacccccattcctactgttaaccaagaccacctgggcttttcctccctgactccaccaagatcgcacgcatggaggccttgccaccgcctccgtagacgcccgcccccagtgcgctcggtcacctccctcctgctggctgccctcgggggcagcacctccctcagagccaaagacatcaagaggatcctggacagcgtaggcatcgaggcggacgacgaccggctcaacgaggttatcagtgagctgaatggaaaaagcattgaagatgtcattgcccagggtattggcaaggttgccagtgtacctgccggtggggctgtggctgtctctgctgccccaggctgtgcagctcctgctgctggttccacccccgctgcagcagaggagaagatgaggaggaggaggaggtgtccaaagagtcagacgatgacatgggatttggtctcttttattaaattcctgctcccctgcaaataaagccttttacacatccaaaaacaaaaacaaacaaacaaacaacagttggtcccaagaagtgacagggcagggatgagtctccccaaaagaaaccctgggaaaatctacttactactaggcaggtatctaagatgtaaacaagtaggcaaatacattttattctttgtcaattatgacttgaaatgctctactgatttcataataaaatagcatctttaaataactttttccatatatttccagaatgctcattatctgtgtcacatggcaccatttttattatttaaggtgtacaacttgataatttgatatatgtatacattgttaaacaatcaccacaatcaatctaattaacatattcatcacttcacttagttactatttgtgtgtgtgtgtgtgtgtagtgagaacacttaggatctaatctcttagcaaatttcaggtatacattacagtagtattattacctgtagtcaccatgctgttcattagatcttcagaatttattcatcttcaaactttgtatcaccaacatctccccatatctccttcctcaaccaccattctactctctgcttctatgagttaaactattttagattatacatattagttagatcatatagcattggtctttctgtgtctggcttatttcacttagcatttattcttacataggatcagagtgacactaattgaagggggagcagtgacaagcaactttgctcagaaatcgggaacaacgaaggggaatttccacatggcattccaactttatgcatacctctaacttgagtttgcatctattaccatttcttgaggccctagacttttcaaactccaggctttgagctgaaaaagttgcaaaagaatataaagaatgaatctgtaaactgatttcttaattgtatattctgaattccagacagagtcactggccacatggcagtttcagaaattaaaccaaaacttaagctgaatcctctaacaaaagtacccatctcccacaataaaaggtaggtaatgaatgattaagggtgataaatgtattatgataaagaattattagtgttacagctcttttagaattttgtctagcaggttttccgatctttactgggaagcccctaaaaaaaagaaaattattgagattattggccagatgcagtggctcacacctgtaatctcagcactttgggaggccgaggtgggcggatcatgaggtcaagagatcgagaccatcctggccaacatggtgaaactccgtctctactaaaaatacaaaaattagccaggcatggtggtgtgcgcctgtggtgccagctactcgagaggctgaggcaggagaattgcttgaacttgggggacagaggttgcagtgagttgacattgtgccactgcactccagcctggtgacagagcaagactccatctcaaaaaaaaattactaatatattaaatgctcataaagattatgatgaaacaattaaaatactcttcaaatatttattatatgataactttagttataaaacaaaacatcggaattgaagagaaatattttttatgaaaagaaaaagatatacatcttttttgataggaagagcagaattctccctcctgtcctcccaaaggagaagctgtttttatgttaggatacaaaataccctagggggctcaagaagttatcagttataccttgagatattttgagtgccagtttaaagaagaaaaaatttagaagatcataaagaagacctaaacccataaccaagtcaaagtgtagaaaaagggtctatatttcaaatatagctggtaaacgaaagctggtaaattagccatgactgaccctgggctaaaattgggaagggagatttacctgtgacattaacaatggctttttctcagtcacctaacaacaaatttcaattaacagccactaatgagcaaaaatgagagcctgatttatattttatcagatcataagaagaacatttttttctctttcacaattatccatttactttctattttgagtgtatcttttctagtgtccttgactatgcaagctgtcttttgagggagtgagttccttgtcactgaaagtagttaagcaaagactagacaatactacatgtaaagggaattcctacattagatggaaggctggattgggttcattccaaatgtaaggttcttcagtcatttgaaactttgaaaaataaagtctttctccaatgtttgatccaagataaggtctgaaattgtgccaagagtgtctttttaaagacagataataagaactttacattgcctggcctagcacggtggctcacatctgtaatcccagcactttgagaggctgaggcgggtggatcacttgagcctaggaatttgagaccagcctctaccaaaaaagatacaaaaattaactgggtgtggtggtgcacacttgtagtcccagctactcaaggggctgaggtgggaggattgctcgagcctaggaggcagaggttagggtgagctgagatcgcaccactgtgcttcagcctgggcaacagagcaagaccctgtcttgaaagaaaaataaaagatctttacactgccttgaattctactttcctcctgcttcttgagaacatagtatttctccatgtactgcatcttctacatcatgcaaaagaaatttgtttatatttagaaatacagatggtccccaacttaacaatggttcaacttaccattttttgactttacagtggtacaaaagccatatgcatctggtagaaactctacttcaaatactcatacaactgttctgtttttcactttcagtacaggagtcaataaattacatgaggcattcaacactttattacaaaataggctttgtgctacatgagtttgcccacctgtaggctaatgtaactgttctgagcacatttaaggtaggctcggctaagctatgtaggttaggcaaattaaatgcattttcaatttacaatattttcaacttatgatgggtttataaggaggtaaccccatcatgaatcaaggaacatctgtacaataaatataaaataacctatctgaataaggacaaacctgagcttcagaaattacaggttgggcacagtggcacacacttgtaatcccaacactttgggaggtagaggtgggaggaacacttgagcccaggtgttcaagaccagcctgagcaacataaggagatcttgtctctacaaaaaataaaaaattagctgggtatggtggcatgcacctatagttccaattactcaggaaactgaggtggaaggatccttgagcctgggcggtcaaggctgcagtgagccacgatcacatcactgcactccagcctggactgcagagggagactctgtcttgaaagaatgagagaaagagaagaaattcaagtagataataaagaggaagcaccagaagaagaaagcaatgttagtaaaaactgagaaaataagacaagttagataaaattccactttcaaaagttaagaacagttttgagactatcacctccttttctcccaggcccctctttgaaaatgagttgaatctaataagtactttaggggatactaaattaataaaccataataattttttgtttaactacaatgtttagtatttcttctagttttactttttttttttttttttttttgagacagagtcttgctctgtcacccagactggagtgcagtgacgtgatctctgctcactgcaagctccacctcctgggttcatgtcattcttctgcctcagcctccgaagtagctgggactacaggcgcccgccaccatgcccggctaatttttttttttttttaatttttagtagaggcggggtttcaccatgttagccaggatggtctcgatctcctgacctcgtgatccacccgccttggcctccctaagtgcagggattacaggcatgagccaccgcacccggcctagttttactttttaaactgcttcttataaagccacaaaactatgagatttcatattttttaaacttttagttttacaagtatcaaaactaaatgcattttaaataaatttataaaattggttataattaaattttggagttaaatcacatttacttaaatgtaattaaattttatttatcatattataagcaaactcagttttacatgatacatttttgtgttcttaaactaataaattacttcagatctgtacaaagtatcttgaaagtattaatatgttcctgccttttccagattttactttcctcaataaatgaaaggtcacccagggtttcaaattttcagaggtgttctctatctttatttcactctcttatacacccatacatatgctggtaaaaatacagtttgacgattgtaaaatagttgtaaaagttgtaaaaaaaaaaaagttgtaaaatagtcatagatacagaggtttctctgtaagggtattcaccacaacaacgtttatacagttttaaaatttgaaactcaaggctgagaattggagccagcaaaaaagaaaattgaaacaacttctctttctaacaacaggaatagtgtaaagcattatggccttgacttttggagtcagacaaatctgggtttgaatctcaggtcttccatttactatctgtataacctgagacaaattatttaattgctctgagcttctgtttcttattttgtaaaatgggggaaatcgtaactggttttttggggtttgtttttttttgagatagggtctcactctgtcacccaggctgaagcatagtggtgcaatcatgactcagtgcagccttgacctcccaggcacaagcaatcctcccacctcagcctcctgagtggctaggactacaggcctgtgccaccacacctggctaatttttttttatgtttttgtagagacagggtcttgctacgttgcccaagctggtcttgaactcctgggctcaagcgatcctcttgccttgacctcccaaaggggtaggagtacaggtatgagccaccatggctggcctgaaattataattttttaagggaagggtgatgggcaagtttagggcagaggaggatctcagtggccaacattttctcactgttcatcctgtagctatgggctatcctaaatagaagatcccttaggatagtagactggatacattgagatgctacagtcattccagtaagcagaaactgatgagtaagactaatatctgctggtttcacataggtagtaaatctaaatattttcacatctttcctcagggatagagacttaccaggatctcttcaatgccaattacaacacaaagaaaagaagctaagtgcttcacaaatggcaggtaatgagaatcatcctcaaaattgaagcataacagctccttaatatgtctgatcctttcttctctaagaaagatctgagatttcaagggttgtctacaccaccatcatttgagagaaaggaaaaaaaaccttacatttttgtgggacaggagggaaattgcttttaaatggacatctccctagaatttaggcagtgctggtcaaataactgtattcaaagaagaacttgtgggtatggaaaagaacaaacgcaaaaagaacaaaaataacaaaagaacaaatataaatcaagtaataaagaacacaaacacagctacagtcctaggatttctcaaagaaaacaatataaaatgagctacactggctaaagtttattcatccaaacaacaaatatttatttaatgccaaaaatgtactaggcgtgggaaacaacaaaacaagtcagatgtggtccctgccctgataggaagtctaatagggaagacaggctgttaaaccatgaacttgccaggcacggtggctcacgcctgtaatctcagcactttgggaggctgaggcaggccgggccgatcacctgaggtcaggagtccgagaccagcttggccaatatggtgaaaccttgtctctactaaaaatacaaaaattagctgagcgtggtggcgggcacctgtaatcccagctatttgggaggctgaggcagggagaattgcttgaacccaggaagcggaggttgcagtaagccgagatcgcgccactgcacaccagcctgggcgacaaagcgagactacgtctcgaaaaaaaaaagccatgaacttgctgaataaatcatttaaattacaatataacacaagttatgataggaaaagcatggagtgttataggagcttaaaggaaagcctcctaatttggtcttgtgagggaagaaagggagtcccagagaaggctgaatgacgaacaggagtaaatcaggcaaatagcgctgacaggagtttctaggcagaaagagcagaatctacaaaggccagaaaaaagggaaagcatgatgcactagaaaaattcaaagaagtcaagtgtggctgtgtttgggttgcatctggtttctgaagaggctgatgctttaccccactaaatttagaaccaatttagaaattgacccaggagacagaaatgaatcaaagaatcaatccaccttgaccagccctgacaggggcagtccctccagggccaccaaggccccagatagcaaaacatcaaatatggaaactagaaaatgtgttctttacagtgcttaatccccaactttcctatgagaggttaatttgttcattctataatcaatcaacctttattgctgggaatttcggtttggaaaacacaaaggattgtcatgatcagattggcatttttcattgtaaaactgagctaaatgccttaataataacagcttatggttttatagacctttaaggtttctaaagtgccttaagatactttggtactcattttaaggggtctattttagtcagatatggtgagacaggcagacgcagaaatgatggccacaaaggaagtttttcatactcacagatccctagaaacagggcacagcatgccaagcatgtggggccacaagaggaagcaccagggtcagtcaggaagtgggcaggggcagcatgtggacaagaaactctattgtggtttctgcaagaaggaatggacaaggcagggtaagcaggtatggggttagctagtttaaacaatttcagtgggctctggcatgtaagggctgtccctagttgtctggtacctagccctgggatgactagggcagggaagtagtgtctctgactgtaagaggtggagaaggcaggtggttgaggatatggtctctggaatatggtctatggaattggatggtttgcagaggaaagacacactcacaatctagtagtcactattctaggaattgaccagccctgagaggggcagtccctccagggccagcaaggccccagatatcaaaacatcaaatatggaaactagaaaatgtgttcgttacagtgcttaatcctcacaactttcctatgagaggttaatttgttcattctacaaatatttattgaatacttcaagatccccagcatctcccatccttactgtcaattggtctgcttactttcccaaagaaaactgaagcaatcagattagaatttccgtagaccctcacctccatgtctacctccttaccagcatctgtatccatatactctgccttccaccaactttttctatttgagcaataaaaattaataatatagaattgattataacccaaagtataaaataaacatccatgaatccacactgatagaaataaatgactaattatttaatttttatttatttatttatttttttctgtgcagtggtgccatctcggctcactgcaagctccgcctcccaggttcacgccattctcctgcctcagcctcttgagtagctgggactacaggcacccgccaccacgctcagctaattttttgtatttttagtagagacagggtttcaccatgttagccaggatggtctcgatctcctgacctcgtgatccacccaccttggcctcccaaagtgctgggattacaggcatgagccaccgtgcccggccataaatgattaaattttcaataggaagaagagacaaatggcagaggtagcaatagccggagggggaaatggggtcacagtgtactttttaagggagaaacagcaaaagtttatacaacaataggattgatataatagaaaatgaaaaaatgatatttcccttacctaagaggagaccctttcttcagtaaattctttgaatatgagagaggggatgagttccaatccacaagggagggattggctctgggtaagagcatacagtttatttgcagcgcagagagaaaggaagatcatgcaggtacaggtgctggtcaggaagtagacatggaggtgggagtgtgtaggaattctatttctcttctttctaatcatccacccagaattactttttcttttttccatggtacataccaccttctaaaatggcatctagtttacctatttattacatttatatgaaggcacagatctttgtctatttagtgcactaatatatccaaagcacttggagcaatacctggtccatggaaagcatgcaatcaatatttgttgactgcctactaacatgcaagagatagtgggaaaaacagaaacaagtcagagatagtttggttccagccctagagaagcctaccttttatcaaggagaaagatgttaccttttacattacacacttacagagcaggtatcgttatctctgtaggagattaatcactgttatacatagagacgctgagacttgaatgtgatatgaagtaagttttattcgggtgtcatttgggatatattttgttccaggtttatttcgtcattctctaatttcagaaaatacatacctaattttggctccagttagtgccttgactatttctttgaaaaactttggattatacaaaacatacatacacacatatgtgatttgggtccaatttgacaaattagttttctattgctgctgtaacaaattgccacaaacataacagcttaaaacaacacaaatttattatctcacagttctataagtcagaagtccaggtgggtacagctggtttctcttctctgtgtcttataggactgaaattaaggtgttggccagcctgtccttagccaggatggtctcaatctcctgacctcgtgatccacgaggatctcctggaggagaatctgctcccagtctcattcagatttttggcagaattctgttcttttttcttgcagggctgacattccagtttctttgctgtttatcagccaggagcttctcagcctctttagcaagcagagaagctcctggctgataaatcaacaatggtgggtcaggtctttctcatgctctaaacctctctgatttctgccacgtctctccagcttctagctatataagggatcacgtaattagattgagcccagaataatctatcttaattatatgtgcaaagtcccttttgccatgtaagatagcatattcactggttaagggattacagtgtggatatctttggaaagccatcttacctaccaacacttggttttgcaacagttagttcattccagttcaagttccgtggaaggatactgtcctttataagaaatgtctattaagcactcatttttttcgcaatcctttttttagaacatgatctccagtcaactatattgtctgtcctagtcctattagtgtatgtacttcttcttgaacaactgtcctgaataacttaatcctatctccccagctttccaagatgcctacaacttcttctacaaggacaaaactggctgtattgatttccatggactgatgtgcactgtagctaagctgggaatgaatctgaccaagcatgatgtctataatgaattgaaatgtgctgatattgatcgtgagtcctttggcttctcattgtttttctcataaaagatttttgtgaatatatagttttcttttaatgactgtataaacatgagaaacaaatcttatttacttgcccccccaaatatatatatatttgtgtgtatatatatatttgtatatgttaaatatatatatacacaaatatatagtacaaatatatatatttgtatattatatgtttgtagactatatatttgaatactatatacaaatatacatatatgtatatatccatatatctatgtatacaccacacacacacacatatatatatagccttaaagggacacacacatatatgtgtgtgtctgcgtgtgtatgtatgtatgtccctttaaggagatcagtgaggtatgtgtacaagttgtgaaatcaaattaatcctagaaaatggactatttgaaaaacactgtgtggaagctaagagtgattgtctgatttcagtatcaaattcaggttacctgtcctgatgtacaaaagcagtaacaatgttaataatgacatgttaccaagagaattcaagccttttgtttctgtttgaatcaaaacagaacaaatctttctttttccatcaagtcccacctatattgaattttaaatgccacagcacttttgttggtatttttaaagcatacagataatgtttttttttttgtttgagacggagtcttgctctgttgcccaggctggagtgcagtggcgcaatctcagctcactgcaacctccgcctcctgggttcacaccattctcctgcctcagcctcttgagtagctgggactacaggcgcccgccaccatgcccggctaattttttgtatttttagtagatacagggtttcaccgtgttagccaggatggtctcgatctcctgacttcgtgatccgcccgcctcggcctcctaaagtgctgggattacaggcatgagccaccatgcccagccatagataatgtttttagtgaatatactgaccgaattattagtagcccaaactgatatgctgtgtgaaaaatatattcagcatattatctcctctcacctctctccacccaactgctagtgccctactcaatcaacatcagttccacctgtcattcagtgtcacttaaggtgtcacttgcttctactaactgtgtcaaaattttctattatttcatggaaacatacacatacccctctaataatactcatcatccttcaattttagaggaaatggaatacagcttggggatgttataataggaataataggggtggttatagcatgggaagacaggacagattccttgcaaacatggccagtctctgagaaaggagcaggtggacagactgcaatggctgggtgctcctggctggatgtttacaaccaccgttgcttctgtgggctgtggaggactgatgtaatggtgctaagaccacttcaagaagaccagggctcacctgagcatatttccagccctcaaatgctctgtttttaatattgaatcatccagagtgttttaatttttatatttaatatatactctgataattaaaatacatcttatccttgtcctgagtctcagatttttgttgcaggagatgggaaggtgaacttctcagactttatcaaggttctaacagataagaatctcttcctcaaggcagtgggtgagtagagatgttatgaacagaaggcagttgggcagctacaactcactgcacagcaaacatcattcacaggcttccagtcgggagacaggtcaggaaggtgtagtctgggatgtgagttacttttgtacctcttctccagaacagtatttgctaaacaaattgatacagtgttaactacatcaagcaggcacttgcactgtccaaacacctactgcaagagacactgccctttggtctccaacgagaacactgaaagagtgactggtgtagaaaaatttggctgccttctataatgtctgaattattttgtcttttttttttttttgagacggagtcttgctctgtcacccaggctggagtgcagtggcacgatcttagctcactgcaagctccgccccccaggttcatgccattctcctgcctcagcctcccggtagctgggactacaggcgcccgccaccatgcccggctaattttttgtatttttagtagagatgggatttcacagtattagccaggatggtcccgatctcctgagctcgtgatccacccgccttggcctcccaaagtgctgggattacaggcgtgagccaccacgcccagcctataatgtctgaattctttaccaagtgtatgcagtactttgggaggcattccttttatttaaaaaaaatttatgtttcagaaaaagaaaaatgtactctctcatgtaaatctagggtgtcgataatttactgttcttgaaaaaataccttccccacactgatgaagactctaccctcagtgctagggctggagagtctgctggaggttagagagcattaaggtgtcacgtgcttccactaactaatagaaaataatttttctattatttctcccccaaggttataaatgatgtgtagttgtacttgaaatattgtcattaatcccctcatggtttgtttataagtttaacaggctgccttggaaaagctaaccattattcatgttttctaggataaacattccaaattccaaatactgtatacagttttgaaaatatattcattcataatctatgaactgttcttaggataaagaaaagttatttcttacaagtagtactatagtaatgggagtttgcctagaatctttgcctagaaccagataataatcattaacacaaaattcatgtttgtgttaaaaatattactatgttttcttagaagttattgaactacaagtattttttaacattccattttattctgtctgctcagtacccaaaatggcctttctaccaaatagaacagacttttaatgttttactgtacctctagttcctgacttgatattattattgtaaataatcagtaaagaggtggtcaatttcttatttcagaaggtatttaaaaatctatcttttgttttccctccatagttccagaaaaggagacctgtttagatttggctggcaacccaggaatcctattgtttgaaatcctatcaaggcttctagagacttcagccctacccagaaagtctataatagaaatagtaaggtaagtgagaaggaaaggagcaaaaacagccttctcagaagcattatgaagatattaacatggcagtcagctcccactaacatccaactccacagggtctggtccaaaactaaggagaagaaggtatctgggcaaatgcccttgtgctacaacatgagaccttattccctcatctccacagtccttcccagctctaaaactgcaaggctgacctcagaccacctaagggccccactgaggacctaagacaaccatgaaattttagcctcctctatctcagaccaaagaattccagcagaacaagacttttccaggaataattttgggtgggcttagaaatccagtttggaatataagacactcttgttcatgctgaaactaccaggggctctcaaaaatctctgactcagagatgaggtacagcaaattcagacctccgaaagtagcctttggactagagcagagccagaattagacttgagaataaaggatgaagaaacattctcatcctttaaacctttaattctcatcctttaaataaataacacacaccaactgcattatttattccagcaagtagcgctgagagtaaatcacctcaatctatttttatcattatcttaaacaaatgttgctattatcagtcttttcaattcatactccttcaaagcattccagtctcccacctagagagacttaagtgtgtagaattccaccaacaatgtaaaaatattcttctgcccctcaataagtagtctctttatactctcctgtctctctgtcagatgtagaatagaggatgcacaaaattctacttttcattccaactcaaagacacttagtaaagcctgctgttggtacacaaattcaacacattgtttaacttctcaatctcagtttcctcatctataaaaagggaatgatgataataatacctaccttataggacaattgtggggctgatatgtgacaatacatgtgaagtgcttagcacactataagagctcaataaatgttagctattattatcatgtggaagtaactagactaagcatacacatattatcttgaaaattgaagcttcagctgggcgcggtggctcatgcctgtaatcccagcacttagggaggctgaggcaggcgaatcacaaggtcaggaattcgagaccagcctggccaacatggtgaaaccctgtctctactaaaaatacaaaaattagccaggcatagtggcaggtgcctgtaatctcagctactcgagaggctgaggcaggagaatagcttgaacctgggatgcggagggttgcagtgagccgagatcactccattgcactccagcctgggcaacagagtgagacttcatctcaaaaaaataaaaaagaaaaaaaaaagaaaattgaagcttcgtttaaaaaaaaattatagccaggcaccatggatcgcacctgtaatctcagctactcagggggctgagatgggaggatgacttaaggccagaagctccataccagctgggcaatatagcaagaccctcctctctacaaaattaaaaaaattaactaggcatggtggcgaatacctgtagtccaagctattcaagaagctcatttgagccgaggaatttgaggttacagtgagctgtgattgtgccactacactccaacctgggcaacagagtgagaccttcctctaaaaaaataaaataaaaataaaatttttttaaaaagaatatacatattatctaatttaatcctcacctccctaattagtatatactatcatcactcccactttacagatgaaaaaactgcagcacaggtcagttaaataacttgcccaagagggaatggtacctatattttagcacagtctgattccagaactcgggctcttatctatctccctatactgcctctcacacccagtaagtgcttaggaaatgttagctgatgttggcatttttattgttattgtggtgtggctgttatttatctggttattatttatctggtcatcttgctagtgcctgatacctaaggagattaaaaatgtttaagacatagtatttaacatataaatggagacaatttgagaggctgaggtgcatggatcacttgagtccatgagtttgagaccagcctgggcaacctggtgaaaccccatctctacaaaaattagctctttcactcaggcccgtggtgccagcaggatgggcaagcgtcatggacttcgtgtggctaggaagctccacagtcactgacgagaccagaagtggcatgaaaaacagtacaagaaagcccatttgggcacagccctgaaggccaacccttttgagggttgcatgagaggtgcttctcatgcaaaaggaattgtgctggaaaaaataggggttgaaaccaaacagccaaattctgccatcaggaagtgtgccagcatccagctgatcaagaatagcaagaaaatcacagcctttgtacccaatggtggttgcttgaactttattgagaaaaacgataaagttcttgttgctggatttggttaaaaaggtcatgctgggccgagcacagtggctcattgttgtaatcccagcactttgggaggccaaggcaggtggatcatgaggtcaggagttcgagaccagcctggccaacatggtgaaaccccgtctctactaaaaatttaaaaaaattagccaggcatggtggagggtgcctgtaatcccagctactcaggaggctgaggcaggagaatcgcttgaacctgggaggcagaggttgcagtgagccgacatcatgccactgcactccagcctgggcaatgagagcgagactccatctcaaaaaaaaaaaaaaaaaaaaaggtgatattcctggagtctgctttaaggttgtcaaagtgcccaatgtctctcttttggccctatacaaaggcacgaaggaaagaccaagatcataaactttaatagtgaaaacactgtagtgacgggccaggcgtgatggctcacgtctgtaattccaacactttgggaggccaaggcaggtggattccttgaagccaggagttcgagaccagcctggccaacatggtgaaaccccgtgtctactaaaaatttaaacattaactgggtgcggtgctgcgcacctgtaatcccagctactcaagaggccaaggcacaagaatggcttgaatctgggaggtagaggttgcagtgagctgagatcgcaccactgcactccagcctggacaacagagtgagacttagtctcaaaaaaaaaagaaaaaaaaaactgtagtgataaatttttatatgcaaaaaaaaaaaaaaacaaaaaattagccaccatagtggcacaggcctgtcgtctcagctacttaaagggctaaagcaggaggattgcttgagcctgggggtcaaggctacagtaagccatgttcacctcactgcactccagcgtgggcaacaaagtgagaccctgtctcaaaagaaagaaagaaaaaataataattatatatgtacacacacacacacacacacatatatatatgtataaatggagagagaagtcagaaatatgtggatatttgaataaatatacggaagtaacataattcaacgtacgttaaataaatgtcaaataagtggcaaagataattatttaatttcctgagaaagcaggtcttgatttggttaatggtagaatttgataggtattcacatagttgacaccgtttattgaatatgtaataaatgcaaagctctgagcaagcactttacatacatcagtttttccctggctaataactggtcttcctgcttgcacctttgactgctgctcccctgctctgcctgctgaacagcctactcacaacactccctgtgcctagctgactccttgactcctacagcaccaaatgagtcttccaaatgctgcagatcatatcactcctctgctcaaaaccttcaaaaccctcccatttccctcagagtaaaagccaaagtcttttttttttttcttttttgagacagggtcttgcagtggcaccatgatggttcactgaagcctcaacctcccaggcttaagtgatcctcccatctcagcctcccaaatgcctgagattacaggtgtgcaccatcacacctggctaatttttctattttttgtggagataggtattcactatgatgcccaggctggtctcaaactcctgggctcaagagatctgctcacctcagcctcccaaagtgctaggattacaggcgtgagccaccgcctggccccaagccaaagcctttacaatgacatattggccctctatgtgcgctgcattcccctttgacctctttgactttgtctctgttactgtgctgtagccatgctggcctccttactcttcctcatatacatcaaacacgctcccaccttaaggcctttgcacttgcttttccctctatctggatacttttcccctggatagaccatgactcactcaactcactctcactacctttgggtctttgttctgatgtcatctcagcaaagccttctctaaccaccctgtttaaaactgcaaccctcctaccactccctgtccccacttctctgctttatttttcttcatactattcatcaccttttaatatgcaataaaatttacttatttattttattatctgtattctcatgctagaatgtaagttccatgagaacaggaattattttttgtgtgttttattcactgctatcttcccagtatctattataggaaaatgcttgatatacaccaggagctcagcaattatttgctgaatgacctccatttaatccccaaatcaaacctgtgaggtaggtcctattacctccatttgtatacaggcaaggagaatgaggcacagagaagatcacactgggatctccagcccagatcttccctctagggtttccatctgcctactgggcatctccatgtgtaagccccacagccacctcaaaccaaaggtaaaaacttaatttatctctttgtccacacatacttcttttttttcttatttttttattatactttaagttctagggtacatgtgcacaacgtgcaggtttgttacatatgtatatatgtgccatgttggtgtgctgcacccattaactcgtcatttacattaggtatatctcctaatgttatccctccctcctccactgaccctacgacaggccccagtgtgtgatgttccccaccctgtgtccaagtgttctcattgttcaattcccacctatgagtgagaacatgcggtgtttggttttctgtccttgagacagtttgctcagaatgatggtttccagctttatccatgtccctacaaaggacatgaactcatcctttttcgtggctgcataatatcccatggtgtatatgtgccacattttcttaatccagtctatcattgatggacatttgcgttggttccaagtctttgctattgtgaatagtgccacaataaacatacatgtgcatgtgtctctatagcagcatgatttataatcatttgggtatatacccagtaatgggattgctgggtcaaatggtatttctatttctagatccttgaggaatcgccacactgtcttccacaatggttgaagcagtttacagtcctacacagtgtaaaagtgtaaaactacagttttacacagtgtaaaagtgttcctatttctccacatcctctccagcacctgttgtttttaatgatttttaatgactttaatgattttaatgactttttaatgattgccattctaactggtgtgagatggtatctcattgtggttttgatttgcatttctctgatgaccagtgatgatgagcattttttcatgtgtctgttggctgcataaatgtcttcttttgagaagtatctattcatatccttcacccactttttgattaggttgtttgattttttcttgtaaatttgtttaagttctttgtagattctgaatattagccctttgtcagatgggtagattgcaaaaattttctcccatactgtaggttgcctgttcactctggtggtagtttcttttgctgtgcagaagctctttagttcaattagatcccatttcttaattttggcttttgttgccgttgcttttggtgttttagacatgaagtccttgcccatgcctgtgtcctgaatggtattgcctaggttttcttctagggtttttatggttttaggtctgacatttaagtctttcatccttcttgaattaatttttgtataaggtgtaaggaagggatccagtttcagctttctacatatggctagccagttttcccagcaccatttattaaatagggaatcctttccccattgcttgtttttgtcagttttgtcaaagatcagacagttgtagatgtgtggtattatttctgaggactctgttctgttccatttgtctatatctctgttttggtaccagtaccatgctgttttggttactgtagccttgtaatatagtttgaagtcaggtagcgtgatgcctccagctttgttctttttgcttaggattgtcatggcaatgtgggctcttttttggtcccacatgaactttaaagtagttttttccaattctgtaaagaaagtcattggtagcttgatggggatggcattgaatctataaattactttgggcaatatggccattttcacgatattgattcttcctatccatgagtatggaatgttcttccatttgtttgtgtcttcttttatttcgttgagcagtggtttgtaattatccttgaagaggtccttcacatcccttgtaagttggattcctaggtattttattctctttgaagcaattgtgaatgggagtacactcatgatttggctctctgtttgtctgttatcggtgtataggaatgcttgtgatttttgcatattgattttgtatcctgagactttgctgaagttgcttatcagcttaaggagattttgggctgagacgatggggttttctaaatatgcaatcatatcatctgcaaacagggacaatttgactgcctcttttcctaattgaataccctttatttccttctcctgcctgattgccctggccagaacttccaacactatgttgaataggattggtgagagagggcatccctgtcttgtgccagttttcaaagggaatgcttccagtttttgcccattcagtatgatattggctgtgggtttgtcataaatagctcttattattttgaaatacgtcccatcaatacctaatttattgagagtttttagcatgaagcgctgttgaattttgtcgaaggccttttctgcatctattgagatcatcatgtggtttttgtctttggttctgtttatatgatgggttatgtttattgatttgcatatgttgaaccagccttgcatcccagggatgaagcccacttgatcatggtgcataagctttttgatgtgctgctggattcggtttgccagtattttattgaggattttcgcatcgatgttcatcagggatattggtctaaaattctctatttttgttgtgtctctgccaggctttggtatcaggatgatgctggcctcataaaatgagttagggaggattccctctttttctattgattggaatagtttcagaagaatggtaccagctcctctttgtacctctggtagaattcggctgtgaatccatctggtcctggactttttttggttggtaggctattaattattgcctcaatttcagagcctgttattggtctagtcagggattcaacttcttcctagtttagtcttgggagggtatatgtgtccaggaatttatccatttcttctagattttctagtttatttgcgtagaggtgtttatagtattctctgatggtagtttgtatatctgtgtccacacatacttctatagttcttccacttgagtttcagatctcagtgcatggttttgccatctcagtgtatttacccaactgtctgagccaaaggcgcagcataatccccagttgtcactgctctctcattccctacatccaaccaatcactaagccctgtctatcttacctcctcaacatgaaagcaatgcatttctctctatccccacagaaacaccctagtgtaagaaagtcactatcttcttggacttaactgtagtatcctgccttgtcactctgtttccatatttgccatctccatccactttccacactgcagccagatcataactgaatatattagaaaatatttaagtggcctacaatgccaagcacaaatctaatcatatcatcacatcacttaccttctaaaaagcctacagtgacctctcaggtttcctatgaaaaagttctaacttaacgtgacatttcaaaggtccttcataatatatcctttgcttaacctccagtctcatatatctctctctgtctctccacagagtcttgctctcttatctcccaggctagagtgctggagtgcagtggtgcgatcaaggctcattgcagcctctacctcccaaactcaagcaatcctctcatttcagcttcctggagtagctgggactacaagcctgcactaccatgcctggctaatctttgtatttttttgtaaagacagggtttcaccacattgctcaagctggtcttgaactcctgacctcaagtgatccacccccatcagcctcccaaagtgctgggattataggcgagagcagctgtgcccagccctcatctcttgtaacttcccctctcacaccctagattacatttaactcgggtcctcaaatactccatgctctctcacctcctggtatttgcctaaaacagtttccccctttgtgagtcagtttcctagggctgtcataaaaaattaccacagccaggaatggtggtgcaggcctgtagttacagctacttgggaggctgaggcaggaggatcccttcagccccaagggctctgggctatagtgcactatgccaatcaggtgagatttagattatgtcacattagttaaatacttgtaatcccaaagctttgggagcccaaagcaggaggatcacttgagcccagaagttcaagacctgcctgggcaatgtagggaaactctctacaaaaaacttaaaaattagccaggcagggtggcttgcacctgtggtcccagctactcaggaggcagaggcagaaggactgcttgagtccaggagttcaaggctgtagtgagccttgcacccctgtactccagcctgggagaccgtgagactctgtctctaaaataataacaataaataacaggctgggcgcggtggctcacgcctgtaatcccagcactttgggaggccgaggcggatggatcacttgaggttgggagttcaagaccagcctgaccgacatggagaaaccccgtctctactaaaagtacaaaattagccaggcatggtggcgcatgcctttaatcccagctattcgggaagctgaagcaggagaatcgtttgaacccaggaggtggaggttgcagtgagccaagatcgtgccattgcactccagcctgggcaacaagaacaaaattccatctcaaaaaataataataataataataataaagacagcaaatacaaacacaagccactagttttggtatgtaatatacatgaaacaattagttataaaatataatgtgacataaattgttaagcaaagattagaatttcaaggaagaaaggaaactatagactagagcaaaagttctcaaacttgcactgtgtcagaatcagctggagtgattgttaaaacacattgctaggctacaggatttctaagttagtaggtgtgtagtcagggccaagaatttgtatttcccacaatttgtattttcccagtggtgctgaagaccacattcagagccatagagtatatagagaatactctgagggaaagaaaaactgagtcttgaaggacctggtgggaattaaattacattatgccattttcacaggcaagtgatgacattgtggatggttgagttcaaggctagggaagaaagtatctgatcataagtcagactctaatcagagcaccataggcacatttcctaccaaccactgcttcagccccaacatttagaatgagtcctttccctcttcctgagaggaaagaaaaggttgtctgtcaccatcccagagagtagtgaagcctcccattgctgtaacagcaagaaatcagcctatgtattaatgagaagcaaggtcttacactttgtcctctgagacagcatgaagtgatgctcttctgcccagaacactgagatgtgagaggttccactgccaaagcagtgagaagcaagtccttccacctcagcagcagtaagcagatccctaccatagctgcagagagaagtccactgttctggcagcaaggaggaagctgatcaccacagtcactgatattcgaggcatgcatgtttgtaagtcagatgtttatactatggatcagagtcctttatcacatacagcctgccagctgtacttattcttaaagaatgtataacctaaaacacccagtaacacatcttctaagtctgttcatacacatacgctccaaaaaaaatgataggaaagaaatgcaatcaatagtgatttactccagatcgtaagcttactggtagtattttcttttcttttttatacttttctatgttttccaaattctctgcaatgagaatttcttttaatttaaaacaaaagttgcatttttaaacctaacacaaagtaataataattaatgtttgcattcaagctggtaccacttaagtgtttgtcaaggatcataattcataagtatttttctaaacaaaacagggaggtcagagctggacatgatagcaggtacctatagtcccagctactcaggaggctgaggagggaggagaatttgagcccaggagttccagtccagcctggcaacataacaagacctcatctctctctaaaaaaaacaaaaacaaaaactctgggaagccttggggaaaaaaggagaccaaaagccaaggaatacagatataaatagtcaaatggcctgtggaaggtatcagtaaatattctataaatatcacagaaatgggcactcaaatattattgaatgaatatgcaaattagatttaaaataagtttcttcagcatatgtaactagcaacttgactttttaaaatttttgtcctatgtctctttgtatccatttctgaattacttttttttttaaagctatttccaaagaaaattccagcatactggcccaggaatgttgtggagtccctacactatgggctatggaaaaaggacacttaagccagacatatgcacacctccaagctcaagcatggctgcctttgctaatgctgcccggattgcaataatgaaagaaaaggatttatttaaatttcttgaagagctcaagagtaagagccatttgttctctctctactgttgtaaaggatttatttgtatatgactggtcagaaagaagtactagagcccaaatggcataagaacaggactgcagcctattctgagtgaccactctctgtcacatagatgtcatttgaaagcaaatgtagatgtaactgaatcctcagacacctgatgaagcctagagtctgtggatgggtggggggtgggagcaggagagtgaagaatgagggccatggccactgagaagaatagacaaagcaaaacaggcaccacatgctggtcttttatgtgaacttcttcttacattgtttgtgataccatttttgtttttatctttttaggatgcaattccggttcagatagcccatattcaaaaatacccatctttccattgttccctaatgtggatggggtggtgatgggaaagccattcaaagacatgcagaaattagagatgctaagaataaaggagcctttgcatttctttgaggattattttttccataaaagagactggaaaacacaggtgagatttagattatgtcacattagttaaatacttggatttttaagcactaacttaacagaactaatgacatgctttttacaacaaatagttttagtcattattttcaaagcagatgccataaccatgttcctaaatttaagtccaggtattaacatttcatttaatttcaacaaataggtaaacttactaaaaaatacagctttggggttggggatggggaatataggaataataacaataaaattttctccaatcctatctctgactgctcccccaaccactcagggaccagaagctgcactctggacacgctccatccactctagattgtggttgggcaaacaccatgagatgagaagaccaggcccgcaacccaaaggggcagtgctgtgatggaggggccatcctgccctcgactagatccccatttatggtcccagctgcaccttctggccttgcttcaagttctgttgactctagtctttttgccccccctcccaggatatacttttgtcatcataagttttaaggtctccagcaactatgcccaagtttctagataaactctcaagaggctctggcctcaccccaggtaaggcctctaggcctaagaaacagaatggaaacttaactggaggccagcccaccctgtggagctctgggttccagaggtccatgtgttgttcacatcactatacaattcctagaaggcccctccccacatagagtttaagaggcccagaggggtatcactgtcacaaatgacctcaggttcagactttatctttcaccaaatgaagtaacacccacaggcaaatatcattgagaagatggaaataagaggacatttatcctcttttaaacttatgtcccaacattcaactactcctccaccccagatgcttatctgtttattgtcaatctctccaactagaatataacattcatgtacacaagggttgtatttctttcactaaggtatccctatcatctaaaatagaatttggcccacaggtaactcagtattttttggaagaaagaatactgtaatacaaatactttatttcctgagagcatactatatgctagattgtctctaataatctcagcagaaataatgtcaatagcttcctaaatggtccccttgcttctactattgtccccttcaatcgattctcaacccagcagccaaagtggttctgttaaaatcagattgaaaccctccaatggcttttcatatcacgcagaatgaaaaccaaaatttttataacttgttacaatgtcccacacaatcaaaacctgagccttccaataattgtagccactagtagctgtttaagtttcaattaattaaaattaaataaaattacaaattcagttcctcagtcacaccagtcacattgcaaatgctcaacagccatatgtggctaatggctactatactggatgacacagaaatatagaaaatttccattattgaggaaaatgttataggccatcactgatctaggctctcattgcctatccaacaatctcatcatccactgctcaccatccagtgcattccactccatcctcaagacctctttactcttcctcttacagactagacgtgctctcacatcatggtctatggctttgctatttcttctgctctaatgttgttcctcagagagctgcatcatagctctcccctcacctcttttaggtcttgtctcaaatgtcactttaggaggcctctctaacaaccccattaaaataacaatccccacattgtcattgtactaaatgccactgaattgttcacttcacatggttcattttatgttacatgaattttcactttaataatttttttttgagtcagagtcttgctctgttgcccaggctggaatacagtggcgtgatcttggctcactacaacctccacttcccaggttcaagcaattctcctgcctcagcctcccaaatagctggaccacaggcatgcgccaccacacctggctaatttttgtattcttagtagagatggggtttcaccatgttggtcaggctggtctcaaactcgtgacctcaggtgatccacctgcctcagcctcccaaagtgctgggattacaggcatgagccaccacgtttggccaataaattattttttaagtaagtatttaaatagctgggtgcaatggtacatacccctaatcccagctgattaggaggctgagggaagaggatcacttgagcccaggagttcaaggctataatatgctatgatcatgcctgtgaatgcactgcactctagcccgggcaacatagtgaggctccatctctaaaaataaattttttaattaaaaataaatttaaaataaaaatttttgaacaaataaatatatttatgtattcaaataaaatcacaacccccaataccttaccccctttcctgatttttttcataacacgttaccatctattacatatttactagtatattacctctaatacactacatatttatatttattatactacatgcatacatatgtatatttacatctatacctactgtatatgtactatatttacaaatattataatatactacatttaatgctatttctattaaactatatgtttatagttatatacatatgtagtatattacatctaatctaatataattgtatatttataaatgttcattagaggctgggtgcagtggctcatgcctgtaatcccagcactttgggaggccaaagcaggtggatcacctgaggtcgagagttcgagaccagcctgaccaacatggagaaactccatctctactaaaaatacaaaattagctgagcgtggtggcatatgcctgtaatcccagctactcaggaggctgaggcaggagaatcgcttgaacccgggaggcagaggttgtggtgagccaagatcacaccattgcactccagcctgggcaataagagcaaaattccatctcaaaatgaaataaaataaatgttcattagaaccaagaaataggctgggcacagtgcctcatgcctataatcccagcactttgggaggctgaggtggctggatcacttgagctcaggagtttgagaccaacctgagcaacatggtgaaaccccgtctctacaaaaaagaaaagaaagaaatggtactttcaagtttcagaaagtaactgagttacatgaacactacttgaccccacacatagactccctatgaccacgttaaaatattggatagggctgggtatggtagctcatgcctgtaaccccaacactttaggaggccaaggaaggtggattgcttgagccgaggaattcgagaccagcctaggcagcatggtaaaattctgtctctacaaaatatatatataaatatatatatgaatactggactaaataaaatgacaaacattcaaaaatgtattcaaaagaaaggaaaaccccatgtttcagaaagcaagagagagagagagagagcacctaaagccagaataacaagttcacaagttaacaagtggcaatagatctcggccctgatgagttgggattggggtttagatgcccattcagggtcaggagatgtggatccctggaagtaagcaactggaattgaaaccagtatctgtaagggttgccctctcagtaaaaggaggggtaagaaactcagtccatagccaagcttggtctgctcaaagctctgaatagagaagaaagtattctgtgaagaatttgaaactcaggattgtaggatgcatggattcagaatctgaatttatagtttccacattggatgaaatctccaagcagtaaaattaccttaaaaaccggttttagattggtattaccttgggaggtctgccagacacaaacataaacacatccatatcctaggtttgcacagcttatatcaaaaatcttttaaaatctcttttaaagataggttcacaaaaattacaagccataaaaggaaataatctactctcaaaaaaagtcagtaggtaaacaagaggagtatcataatttgatatagcagatctttaaaagactgtaaaacatgttttaaattattaaagagaggtgtttagtaatgactgagtatttttaggaatgactgagaatttttctaaattgataaaagatatgaattcttaaattgaagaaaacaccctggagcagcatatataaaagaaaatacaacttgaaacattgcagttgaaaatggagacaaagaaaacacttcaaaagcaaccagaggccaagcacagtggctcacatctgtaatcccagcactttgggaggccaaggcaggtggatcgcctgaggtcaggagttcaagaccagcctggccaacatgatgaaaccccatctgtactaaatacaaaaattagtcaggcatgatggcacatgcctgtaatcccagctacttgggaggctgaggcaagagaatctcttgaacccagaaggcagaggttgcagtgagccgagatttgcaccactgcactccagcctgggccaccaagcaacactctgtctctaaagaaagaaagaaagaaagagagaaagagatggagggagggagggagggagggagggaggaaggagggaagaaaggaaggaaggaaagaaggaaggaaggaaggaaggaaggaaggaaggaaggaaggaaggaagggagggagggaggaagacagacagaaaaaataaataacttacaaaggaacaaaaagtagactaacaggagaccatgcatgcaaaaataaaggccagaagacaatcaaataatatctatagattgaggagagaaaagtatttccagctaagctatcattcaagagggagagtaaataaaaacactttcaaggccgggcatggtggcttacacctgtaatctcagcacttttggaggccaaggcaggcggatcacctgaggtcaggagttcgagaccagcctggccaacatggtgaaaccccatctctactaaaaatacaaaatgtagccaggcatggtggcgcgtgtctgtaatcccagctactagggaggctgaggcaggagaatcacttgaacccgggaggcaaaggttgcagtgagccaagatcccaccactgcactccagcgagactctgtctcaaaaaaaaaaaaaaaaaaaaagaatgtttgacattataagggtgttgttctttcttacttgtctataactttaatgtgattttttcaaattttccccaagggttttttgttgttgttgttgagacagggtctcaactttgtcacccaggctggagtgcagtgatgtgatatcagctcactacaacctctgcctcccaggctcaagcaatcctcccacttcagcctctctagtagctgggactacagacacgtgccaccatgcccagctagtttttgtatttttagtagagatggggtttcgccatgttggctggtcttgaactcctgggctcaagcaatccaccctcctcagcctcccaaagtgctggaatcacaggcatgagccactttcatgactctgtctcaaaaaaaaaaaagtctcaattattaaaacagtatgatattaacagacagacccaaggaagaaaatagaaagtcccaaaataaatagagctatgtggagaattttaacttaaggaaaacgtgacatttcaacacaacaggaaaatgatagattattcaacaaataatgcactgagtaggcatctgaggaaaaaaatgagattcacacttcatatacaaattgcaaatggatgaaatgtaaaaggaataaatggagggtcagagagaaagaaaaagaaaagaaaccttaaacatactgaaataaactctgggaaagcctccctaactgtgatacaaaagtcaaatgcatttttaaataaaaagatattaattccactgcttcaagatcaaaaatctccatatggccaaaaaaaatcacagttgccactcataacacagaaggctaacttcaaagaacttcaaattcataagaaaaaaataacctatataaaaatgggcaaagggtatgaacagacagttctcagaaacatgaaaaaatattcaacctcattcctcataaaagatccaagttaaaactctcctcagatatttatcttttcatattatattgatcaagatgaaaaaacatgggtatactcataagttacagatacgtttgtaaattggttcaccctctacagaggaaatttggcaataattaccaaaaggacagacctcacaccttttgacctagcaattccagtcctagggcaccatctaggatatacagatatttttgcacatatgccaaatgccactcctgagggacccggaaaaaagtctaaacaaacaaacaaatggtttggcaataaccttataaattatatacaaatccttctataataaaatatacttatttattatgtctttttgttgtataattcaaattaaaatgtattactaaccttcttttttaaatatgcataaaggcagcaaatataaagtctatggaccctgcctcaggttattcaaataacatcttcaccattgatcaaatgctcaagaaaaagcagacttgtacagtggccgatgcaactgctattaaacaacatgtgagtattccttgttgagttccttcccagaaatcactgacaaaaatattgtccacttcaatactacaccataaaaccaagagaatttttatctgctctatgtctttaaaatgagacaaggttgtttctcatgtttacccattgtaataacaccatttctttctctataatcaaatggattcaaatgttaagtgttatgattcatcctgctattcacctatgcagctatactcactgttatttctgggacattcatttgtgttattccagaaatatcaaactaattaaggtagttaaccaacagtcacagtgagtagtgtactcagagattcatggtgaaagaatcttacgtcctgaggcctctagccctgggacaccagctgcaccagggctaagaagcttgagaagatcaatagtttgatattaatacattggaaatcttggcattaggtaaagaacagctagggcaagtattctttgggctatctcaatctatcctccttggttcagctgccacctatgtactgattactgttaaagttgtcactaacctaacttctttcctctatgtctgtcctatctcactgaccacctgatgactatttctacctctacgctgggtctcataacataacaaactcaacatgtccaaaacaaaactcatcatcttctgcagccaactggttctcccctgggaattctgtatctcaggtgtttgtttgtttgttttgtgtgtgtgtgtgtgtgtgtgtgtgtgtttaaataaggtcaacttttattttagatccacggggtacatgtgcaggtttgttatgagagtatattgcatgtgtctcagttgatagcatctactcagtcactgaagctagaaagccaggagctatccttaactcgggttttttcctcattcctcacatctgctaatccccaggtctggctgattgtcattctctaaaaggtttttcagggctgggcatggtggctcacacctgtaatcctagcactttgggaagctaaggcaggcgaatcacctgaggtcaggagtttgagaccagcctggccaacatggtgaaaccccgtctctactaaaaatacaaaaattagctgggcatggtcgtgggcgcctgtaatcccagctactcgggaggctgaggcaggagaatcccttcaacccaggaggcagaggttgtgatgagccaagatcgtactactgcagtccaggttaggcaacagggcaagactccgtctcaaaaacaaaaaaaaacaaaaaaaaacaaaaaaaccacatttttcaaatctgtccccttcactccatccccattaccactgccttagatgaggcagtctccaacctggtatcctccaaccattctccacacagctgctaatgatccaacatgaagagccaaccatggcactgtactgcttaaaagtgaacatgtccctctcaatgatggcaatttcaactctattttctgcttaagggatttatttcactttcattagaaacagtgggtcactacagcatgattttcactgaggaataggcttttgctagcctcacagagattactgacttataagattaagtgtaagggcctgcctgtcctttgtcattatttattcctcccactttaaacttgacactccagcaataccaagtgcctgaaccctcctgccacacctccaggatatttactgccttggggtctctgtttgtgctgtcccctctccctggaacaccttcccctcaccacttactccgtcaatttgatcacatccttgaggacctactcagctcagcatcttctcccagtcagttctccctatcctaggctgaactgagtggctgaattggccctcctgttatatccctagcctatctccataccatacttcagtctattttagtccattgtatttttcatatccttataaaatttcttattacctcattattcccaagcagtacattttgattgtccatcacctcctagctcacacgtcctcacgaggcaccacctaatgtatagattcagtgactttcgagtagcccagggacataactcttggggtatctatcattgtggtccacaaatcaaagctactttaaggtaactacaataaacttctggtctctcactgcaggtgaagagagctactgatacctataatttaggaattgcccttgaacaccgaaaagagatgctaaacctctggcagaagatccgaggggatttgattgggatggactctagaaatgagtccttttatgacaccttttctacttatacatggtcctggaatgtttgccaagaattactttctcctaaggacttaaggttatatgatgcctatgtgaatagaaattcctcccataactccagatcctcttcctcatcagataccagtgaatgttacacagactcaggaagaaaaagaaaacggaaaggtttaaagggatttcaacaatgaaatttctacattttctaaacagctcatcacaaactactttttcatagttatcaaaattattgtttcttgcttttgtctaagtacattcttagaagctggaaattttgacatcttttggattctgaccagtaaaaaagtttaagtcataaaatggtttccctttcctaaatctttttttttttttttttgagacagagtcttcctctgtcaccaggctggagtgcagtggcatgatgttggtttactgtaacctccacctcctgggttcaagccattttcctggctgagcctcccgagtagctgggattacaggcacccaccaccacacccagctaatttttgtatttttaatagagatggggttatcaccatgttggtcaggatggtctacgatctcctgacctcgtgatccacccgcctcggcctcccaaagtgctgggattacaggcgtgagccaccgcacccggccccctttcctaaatctttactagtaaatagatgctgggctgttagttccctagcaaccagctgcactctgctgcccctacctggcttaagactgcctaagcctcatcaggaaggagaaaagttggcctgagctaagggccctccaagcaataaacctctgagtttatggtgagtgtaaactgggttaggttttcaattgtttgtgaaagagactagagacagcagctgaggatgacctttcagtttcagggaataggatcagcaagccctaaatgaaccttgattaaatttgggtattcccaaggctccttagctacacagctgcacacttagattgctcttacaaatagctgaacacagccagatgcgatggctcatgcctgtaatcccagcacttcgggaggctgaggcgggcggatcacctgaggtcaggagttcaaggccagcctggtcgacatggtgaaaccctgtctctactaaaaatacaaaaattagtcgggcgtggtggcacacgcccataatcccagctactctggaggctgaagcgggagaattgcttgaacctgggaggtcgaggttgcagtgagtttatggtgagtataaactgcgattatgccactgcactccatcctgggtgacagagcaagattctgtctcaaaacaaaacaaacaaacaaaatgaatagctgatcacatccattgtatttattgttgctgttctttaatgcatttgataaagaagcacatatataactatattacaagtttgggggattataattttttattatggtaaaatacacattacataaaatttgccctttcaatcatgtttaagtgtgtatcatccattactgggttttttgttttggtttgttttgttttgtgtgtgtgtgtgtgtgtgtgtgtgtgtttgtttagagacagggtttcactctgtcacccaggctggtatgcagtgacaaaatcatggctcgctgcagcctcaacctcctgggctcaagcaatcctcccacctcagcctctcacgtagctggaactacaggggcacaccaccatgcccagctaattttttttatttttatagagacgcggactccctatgttgctcaggctggtctcaaactcctgggctgaagtgatcctcccacctcagcctcccaaagtgttgttattacaagtatgagctactgtgcccagtcccactggggtatttttctgtggttctcaagggttgcccacagagagacagaccacttttggactcaggaaatctggatgtaccaagactaaatctatattaaccttctgatctactgtcaggatggcaaaatgttttatttcttgtgccaattctgatctaaaaatgtaagggatgaaaaaaaatataagggatgagatcaactatttgtaaatgttgtccgagaagctggtttgctggtgtgtgggtgcaaaccagtccatcacactcaacatatagaacaaatgctttttaaatcactattctagaaaaattttgacccagaaaaaggaaaagatatgtccaatattgatggggacaatgcctcataatgtcaaaaaaaaaaaaaaaattgaggcagagtctcactctgttgcccaggctgcagtgcagcaacgtgatctcagctcgctgcaacctccacctccccaggctcaagcgtttcacctgcctcagcctcccaagtagctgggattacaggtgcgtgccaccacacccagctaatttttgtatttttagtagagatggggtttcgccatgttgcccaggctagtctcaaactcctgaactcagatgatttgccaacctcagcctcccaaagtgccgggataacaggcatgagtcactgtgccccgctgtaaaattataaaatgccaggaaaaagcaatgaagatagtgcccccaaaactgtttattgaaatggccttgaggtaattttgtgagtgttaacatgaatagtcaaaagagtctaaatatacctgctattatttataaagatacaatgttggagagaagaactaaccttataggtagataagcagccatattttctagctaaaaacaagatttatgacttgacaagagacttttcatatggctgtgggtataacagggaatctaggagatataatttggatgccaaaatgttacaattcctggaatatttctttgcatcagtgagataacagggcagaatatttttaataggatctgtcctggaaaatctaaaatgtacagcaatacattctttctattgaattgtcacacactgttgatgacagtgtaaattggcatctctgtgctgaaatatggtatagcaagagggtactcacccatccattcattcatcaattatctactgagttgcatactgtttgccagacctagttctaggacctggacatataacagttaacaaacaagtaaaatgacttaacctcacagagcttagtgatggagctaattataaccattgactcagcaattcctctcctagaaattaatcataaagaaataatcatgaatgtacaaaattatttcattacaaagatgtacaccatgttgaatttttttctgtttttttttctttctttttttttttgagacagagtctcactctgtcacccaggctggagtgcagtggcgtgatctcagctcactgcaacctccgcctctagggttcaagccattcttctgcctcaccctcccgagtacctgggactacaggtgcgtaccaccatacctggctaatttttgtatttttagtagagacggggtttcatcatgctgaccaggatggtcttgaactcctgacgtcgtgatccacctgcctcggcctcccaaagtgctgggattacaggtgtgagccactgcacccagccgttaaatttttaatagtatgaaacttaaagtgacctaaatgtccaataaagcatgatatagctatacgaaacaataccagaaggacattaagtgatgttgtaaaagaatatttcgaacaaaagaataatgtccccaagttattattaagttaaaaagcagactacaactgctaagtggcatgggagaacttcaaggcgttgttctaaaactagattgtgacactgattacacaaatacagatttttatgaaaatgtattgaactgtacacttaaaatggatgaatgtaattgggttttcttgttgttgttgttgttgttgtttgagacggagtcttgctctgttgccaggctggcctgcagtggcacgatctcagcccactgcaacctccgcctcctgagttcaagcgattctcctgtctcagcctcccgagtagctgggattacaggcacccaccactgtgcccggctaattttatttatttattatttatttatttattatttattttttttgtgtgtgagaaggagtctcgctctgtcgcccaagctgaagtgcagtgacacaatctcggctcactacaacctccaacacccaggttcaagtgattctcctgcctcagcctcctaagtagctgggactacaggcgtgtaccaccacccctggctaattttttgtattttagtagagatggggtttcaccatgttggccaggatggtctcgatctcctgacctcgtgatccgcccacctcggcctcccaaagtgctgggattacagacgtgagccaccacacccagcctaatttttgtatttttagtagagacgggggtttcaccatcttggtctggctggtctcaaactcctgacctcgtgatccacccaccttggtctcccaaagtgctgggattacaggtgtgagccactgcgcccagccagatgaatgtaattgtttaaaaaaaaaagcacaaagcattttgttctgaaactattttaatgtaaagtcacttacataactaaattagaaagaaagaactgggatgatataagccaaagcgttaatgagtcaaattaatggtgggaagaagtattttcttttgttttatcgatatcttctaaatgttctataataaaaaatctattttgcaataagaaaacacaggccaggtgcagtggctcatgtctgtaatcccagcacttgggggaggccgaggcagacggattgctcaagaccaggagttcgaggccagcctgggcatcatggcaaaacactgtctccacaaaaaatgcaaaaattattggggtatggtggcacaaacctctagtcccagcttctctgttggctgatgtgggagaatcacttgagcctgggaggcagaggttgcagtgagctgtgatcgtgccactgtactccagcctgcgtgacagagtgatgccctatctcaaagaaaaaaaggagaagaaaggccgggtgcggtggctaacgcctgtaatcccagcactttgggaggctgaggcagacggatcatttgaggtcaggagttcaatatcagcctggccaacattgtgaaacccgtctctactaaaatgcaaaaattagctgggtgtggtggcgatggcctgtaatctcagctactcaggaggctgaagcaggagactggcttgagcccgggaggtggagcttgcagtgaaccgagatcatgccactgcactccagcctgggcgacagagcttcgtctcaaaaaaaaaacaaaaaacaaaaaaacacaattaactacccttgtccttggctaacaacctaaagcaataatccagaatgagagtttttaacctttacaagcgttaaacccatgccacccactgagctagaagagttctccttacttaccaccagagggacccttagttcctctgaaacgtggcgtttctgaagctacaatccagtataaagtctgacaccagagaactcacagccatgtcaaacttatgaaaaattattttaggtgcttcgaaaaataggttttacaggccaatcaaatataattgtataaaattaagtttaggccaggggcggtggctcactcctgtaatcccagcactttgggaggccgaggtgggtggatcatgaggtcaggagatcgagaccatcctggctaacacggtgaaaccctgtctctactaaaaacacaaaaaattagccgggcatggtggcgggcgcctgtagtcccagctactcgggaggctgaggcaggagaatggcgtgaacccgtgaaatagggagcttgcagtgagccgagatcacgccactacactccagcctggtagacagtgcgagactccgtctcaaaaataaataaataaaaataaaaaataaagttaagtttaggatactttagcacatttcacagaaaaaaggccaaagctgtttgacatttaaaatgtctccactggaactaatatagtaaattagagtgaagacaatgagctgtctgcaagaaaatatgcagtgggactgttgattgggaacactaacagcttttagtgaggggagaataaaagcccatagatgagaaaacaagatgccagaaataaatgtaaatcaaccaccatatctgcaaacagctggccttgagaaaagataaaaattccttgtacttgtttctgggtatggagcttgtgttcaaaatgtttccgaagaccacaagaatggcaaaagcatattgtcttcaaatgaagtacaacttatttactattttttttattaacttgtgtatttttcttcctgattagagaggcttagagcttgttcccatttctttggaggaaaaagtatagaatcattcattgctccccgtagttttacctacagaaagaatttacaatggaataaacaattactggctgggcgcggtggctcacgcctgtaatcccaacactttgggagaccgaggcgggcagatcatttgaggtcaggagtttgggaccagcccaggcaacatggtgaaaccccatctctactaaaaatacaaaaattagctgagtgtggtagcgcgcacctgtaatcccggctactcaggaggctgaggcaggagaaccacctgagcccagaacatggaggttataacgagctgagatccggctactgcactctagcctgggaaacagagcaagactccgtctcaaaaaaaaaaaaaagtactaattacccatgtgctatgtctagcactgcactaaccctttccttttttaaaaaaattcatctttccctttattctgacattatgacattaaataaagtccaagaggtattgggctggtccttgtttggtctctgccctttccttcttttccaagtggtattcatcatgcttctcttggaagtcttctcaaataaccttatgtctataacatactttcttctagattcttttgagagtctatttgtgttagatctagaaatagaaatgtaaggctgaaatgtattactatgacaaactgtttgtatgtgtgtattacaatcttaattgtgctaataaggataattataataaatatgcatgattcaaaaaggttagatggttataatttaaaaaaaaattgtccttggatattccatttgatttgctaagcctcgtgttctctaatttcatatctccatctccccctaccccaaccaaaatatatatacacactgtgtatacatatacacccacactattaagagctgaatatagaagctggaaattgccctgtttcttcccgctgcttgctaccttcttcagttctggacatcggctccgcagtggaactaggtagcctcaactcttataatgattcaagatttttcctgttttataacttgagggaagctggggaacctgttaagaggatcccagcattgaactgggtctcaagtggaatgtctcccactttctgcctaacctgcacgtccatcagcacctcatcaatgagaaacgactcctccggggagaatttccccctgcctggtcccctctcctagagagcccttcgccaaccctgggacagccccaaacgacagctcccgagcgccacccggaccagactccagtgccgccctgtcccgccaccctttttcccgcccagactccgcgtcttctgaaagagggcgtggtccgcaggaagttctcacgttacggaaagtaaagtgtttccggctccggtgtcatggccggctcctaccctgaaggtgcacctgcagtcctcgccgataagaggcagcagttcggaagccggttcctgagagatccggcgcgcgtcttccaccacaatgcctggtaatcactctgccccttcgcccggcctgtcgctgaccctctgtcccgccgcctcggagcactccgaaaagcccctgaccgccggccacgagtcaagctgccctacccgaggcactctccaaggggagagaaactcctaggccagcgactcaccctgcccgcagccaggacgtgaggcccctaagctgcccgtttgattttctcagggacaatgtggagtggtcggaagagcaagccgcggcggcggagagaaaagtccaggagaacagtatccagcgggtgtgccaggagaaacaaggtgcgcttaaatgggctctcattggtatcaacagccagcgtactgccgaacgcgccctcccggagaggccagggaaccgcggccgcccagatcctttattcctggcctgatgcagatctcaggagtagagcgggacagggaggggatgagcaaggagagaaaagggctgcattgtaacaaaatcttaagtcgtagagggtttttttatatatagttttactttggaggagggtaatgttgtctttaattatgtttagtagatccacgttgatatggctagccaatgacaactgtgtggtcacgcgatcatcttagaacctgtactttttacttgatttgcattttccatgaggagatgttttccattgaagcttcattgaagtgattagattctaaatattgttgggaggggggctagtgactggtgactgtgtgtctattacttgtgtgatggttatgagaatttagggctttagtcaaggaaaggtggatgcagcagagtggagataagtctggccaaagaaaaggaggcccctgcttgagaggtggatgatttcactgcaaaatatccctagatagtaaaactaggactgattgttccagacaattgaagataggactacaaatttagtacccgctgaaagagttctgtacaacaaaaagattccagttacaaaacattcaccctgcatattttgacagcaactagatcaaagcaagttaatagttgaaagggattttgaaaatcatgtggttcaatattctctttttatagttaaagacacttggaccacaggacattaagtgcttttcccagaggtaagcagtcagtagtagcagtagtggaactaaaatcctgtttcttagggagtcttggttgattcagcaggtgagttgtgagttgttaacacacttcttagtggattccaacttccattgtcactgtcctgctcaatttgttaggtttttattctttctactacactagtcaaggccccctgaattggcaagagcagtaaactgaaatctgggactgtcatgatcaccttaaaaacagccttcatttaaactgtccatactttttttttttttttggagatggagtctcgctctgtcaccaggctggagtgcagtggcacgatctcagctcgctgcaatctcctcctccctggttcaagcgattcccctgcctcagcctccctagtagctgggactacaggtgtgcaccaccacgcctggctaattttttgtattttagtacagacggggtttcaccgtgctggccaggatggtctcgatctcctgacctcgtgatccgcccacctcagcctcccaaagtgctgggattacaggcatgagccactgcacctggctacttctaggattttttaatagttaaaagtcatctggctgggcgcgatgactcatgcctgtaatcccagcactttgggaggccgaggcgggtggatcacgaggtcaggagatcgagaccatcctggctaacacggtgaaaccccgtctgtactaaaaaatacaaaaaattagccgggcgtggtggcaggcgcctgtagtcccagctactcagtaggatgaggcaggagaatggcatgaacccgggaggtggagcttgcagtgagccaagattgcgcccctgcactccagcctgggtgacagagcgagactctgtctcaaaaaaaaaaaaaaaggcatccaaagatgtaggaggacacttgatagatagtaagttctctggttgattgttcaaacagaatttagactctcctataatgacggataggggcattagggtataatgccagatggcaggactaaatgacctcagaaatgccttcagttctgggactgtggctctacctgaggatacttttagtattaaagtgacatttggtaaagcaggataattgatattagatataaataaaacatttgagagctggttcttaaaattttttcttaaatatttacagttgattatgagatcaatgcccacaaatactggaatgacttctacaaaatccacgaaaatgggtttttcaaggatagacattggctttttaccgaattccctgagctggcacctagccaaaatcaaaatcatttgaaggactggttcttggagaacaagagtgaagtacctgaatgtagaaacaatgaggatggacctggtttaataatggaagaacagcacaagtgttcttcaaagagccttgaacataaaacacagacacttcctgtggaggagaatgtaactcagaaaattagtgacctggaaatttgtgctgatgagtttcctggatcctcagccacctaccgaatactggaggtaaccttttattgtcttggtagtgggatatgtgaagctattatatttgtgcacatgaggtagcatagagaggctgacaacaaaagtaacttctattggatgatgctgactagacttgacccttatattagcctggaatcacctccatttttgaactgataaaatgccctcaatgcagaccagatatctggtagtcatgacggacaaagatcacacgagaatagcatgtcacttccaaaaattgtattaatggcatcatgctgtacctgtcacatgccactgcatcatacaggtgaaggagctcaacatgatcatgctataactctggaaaaaagtcccagatcagaagaaattgttgcttctcttctaatacagttacaggaatggagagggtagttaggatggtgcctgtttcttaggcctgggataattctcttcctctgcatttggatggtgttgcagagtctagacctggaaaaatgtctagattggtataatgtaaattcataaatggggactgcgcacgttactggaagctggttctggaactggtcagccttgggattgagtcctatggtgtgatcttagacaatttccttaccctctctgagcagtgagactgctgcctctgcactttatagttatgaggatggagataatgtatgtaaaagggctaagaacagtatctggcacatagttaagcccttaataaatagttgctgtcttcattaccacgcagcactgtgtttaggacaaggttgtcagggtccccttttcatacatttttcagcacagtctattacaaatattttcacaataataatataagctcagtaagaaaatacttcatctacaggaccatttgctagaactcaaaagataaaagcaatccttgcccttttttctagaccacctcgtttctgctaataaaaacccgtgctcttgtcttttaagggttcctgaagtcaacatcaaaatcaacaaatgtcatgagtactgtttagctctggtcactacaccttccctaatacagttaggccagattcttgttgattattatttttctagcttttctagctttagggaattaactctggaaagttctgtgattaatagttcatttctgtctgcaggttggctgtggtgtgggaaacacagtctttccaattttacaaacgaacaagtaagtatgttgtaaaagtttatgatagcaaagaagataaaagtgaaggttggctgggcgcattgcttcacgacagtaatcccagcactttgggaggccaaagcaggattgcttgaggccaggagtgtgagaccagccagggcaatgtagcaagaaaaaaaagtaaaggttttttcaaaacttgctgcatcaaactatcagtaatggttattggaaaatatggattatgtcagattcagatttctacattgttcatttatggattgttttaatttgattatctttgtcatttggaaaattagacttaaaacttgctagtgttaacatttagcgccttcttcttcttctaaggaacaaatgtgttcaacttttccattctcatgatctctgaagaacagtcagtggctgagttgtcatcacccccatggtagagttgagaaagctaacatacatgaagatgtctcctgttctgatgaaaacacactggttttgtgtacttaaacagaacgcttctgacaccaaatgtgcggggtttttgccaacactgaccaattcaaaaacagctgggtgtcctacaattcaattctgacactgtctacttggagttggtgtcagatcccacaagttaagggttcggtcccagaagactgccccccacttcagatgccagttgtgaatctggccctccgtgtttctgccctacaggctgtaaatcagggtagccctatctccagttcaataatttcctagaatggctcacagaactcagggaaacactttacttacatttatgtgtttgttatgaaggatacagattaacagccagctgaagaagtaattagagtggggttcagaggatctcacgctcaggagctttgaccctgaggagctcagtgcagtgtcctcctagcacacggatgtgttcaccaacctggaagctcatcaaggggttttttttagttttgagacaagctcttgttctgtcatcccgactagcgcacagtggtgcgcccatagcacactgcaggctcaaactcctaggctcaagcaatcctctcacctcagcctcccaagtagctgggactacagacacatgccaccatacccagctaatttttgtttattttttgtagagacagggtctcactttgttgcccagactggtctcaaactcctgggctcaagtgatcctcttgcctcggcctcccaaagtgctggaattacatgcataagtcaccgttcccagcctcaagagtttttatacagctaggacacagactcatgggaaaattaattttaaaaggagaagaagaaaatagttttcatacaacataatctgcatttctattcaggacattggtgggtgaagctgaaagttccaatcggtttgcccttactagtgttggccccaccccaggtcatctcattaaattcagtgtggtcctgagggagttcattatgaataacaaaagatacagagtcttgcttcatcacccaggttggagtgcagtggcacaatctcgactcattgcaacctccgccttccgggttcaagtgattcacctgcctcagcctccctagtagctgggattaagggtgcatgccaccacacacaactaatttttatatttttagtagagacagggtttcaccacattggccaggctggtctcagactcctgacctcaggtgatccacctgcctcggcctcccaaagtgctgggattatatgtgtgagccaccgcgcccagcctgctgaggaaattcttaaggtttttggaactctgtgcctggaaccacaaagaccaacaccagatatatttattataccatatctgttttgttttgtttgagatggagtcttgctctgttgcccaggctggagtgcagtggcgtaatcttggctcactgcaacctctgcctcctgggttcaagcgattctcctgcctcagcctcccaaatacctgggattacaggcatgcgccacaatgcccagctaatttttgtatttttagtagagatggggttttgccatgttggctaggctggtctcgaactcctgacctcaagtgatccacccacctcagcctcccaaagtgctgggattacaggcgtgagccatggctcccggccctatagctgtttttaaaccccttgtggaaatgacattccagttctgtatgcattactggaatccactgtttctcaaaggtttcatataatatatactttgccaatttagcccacagtattcattaacaggattaagtaaaacattagcctcattactaatatacacttaaatatttctacaatttgttctcagaaatttctaagaaaatggcaagtcctagtagctaacactgaagaaaagagattgttctgctcttgaagttacagtctgaggaacccacctcaaatgggagattgacttagcttcaagttatggccattaattatcaatatcatcaatgcatgtaaaataatgtagatggcatctttgccacagcctctttatgccatttaaataagatcgctgtgttcaatatcttgctagaacccacttgttcatgtaattcactggcttagaattgacatgttttctactgcctgtgaatcaggtttaaattgttgggcatagttttcaaagtcctctacaagagtgtgccctataaagtatgtcctcttatccctcagtgcactggtcacaccttgcatgtcttcccctgactccgtacctttccaaaatgtcctttgtttctactacactatttccttccttcctcacattctagatcagaagcatctagaaaacttccctagttgttatcgtccagctgcctcactctgcagtcttttttgagacagtctcactctgtcacccaggctggagtgcagtgattcgatctcggctagcctcaacctccgcctcccaggttcaagcaattatcctgcctcagcctcccgagtagttgggattacaggtgcccaccaccacgcccagctaatttttgtattattgattgattgattgattggttgattgagacagagttttgctcttgttgcccaggctggagtgcagtggtgcgatcttggctcaccgcaacctccgcctcctgggatcaagcaattctcctgcctcagcctcccaagtagctgggattacaggcatgtgccaccatacccagctaattttgtatttttagtagagacggggtttctccatgttggtcaggctggtttcgaactcccgacttcaggtgatccacccgcctcagcctcccaaagtgctgggattacaggtgtgagccactgcacccagctaatttttgtactttttagtagagatgagctttcaccatgttggccaggcgggtctcgaactcctgacctcaggtgatccacccacgtcggcctcccaaagtgctgggattacaggcatgagccaccatgcccagcccactctgcagtctttacagcctttttatgtttcttgagttaccctattgcctggatcctttttttttttcttttgagacaggatttctgtcacccaagctggaatgcagtggtgccatcacagctcactgtagcttcaaccttccagggttcaggtgaccctcccacctcagcctcccaagtagctgggacaacaggcgtgtgccaccacccctgctaatttttgtcttttttgtagaaacggggttttgccatgttgcccaggccagggttcttaatatttttttaatgtatctgataaagccttaggatcatttctcaggctaatgtatttttcatttgttttctttttatatatagcagctttattgagatataaagtgtataatacagtggtttttttgtttggttggttttcgttttgttttgttttggttttgagatggcatcttgccctgttgcccaggctggaatgcagtggcacgatcttggctcactgcaacctctgcctcccagtttcaagcgattctcctgcctcagcctcctgagtagctgggattacaggcgcccgccaccacacccagctaatttttgtatttttagaagaaatggggattcactgtgttggccaggctggtctcaaattcctgacctcgtgatctgcctgcctcggcctgccaaagtgctgggattacaggcgtgagccaccgcacctggccgtaatacagtggttttaagttaattcacagagttgtgcagccatcactgcagtcaacttcaggacattttcatcatcccaaaaagaagccctatacccattagcagtcactccccatttcccaatttcccccaatctctagccctaagcaaccactactctacaaatgcacaaatctatatagctttatcttgggctaattttaagtatatgaagtaaaatagagaaaaccaattattttgaaatacagttctatcctcagagcccaattaaggactctgattttaaaaataatactcttagcccttcatattcaccttttctgcatccgaggattcaagcaatcatggattgaaaataaatagtgtaggccaggcgcagtggcccatgcctataatcccagcactttggaaggccaaggagataggatcacctgagcccaggagttcaggacgagcctgagcaacatagtgagaccctgtctctacaaaaaaattagccgccaggcgctgtggctcacacctgtaatcccagcactttgggaggccaagacgggcagatcacaaggtcaggagatggagaccatcctggctaacacagtgaaaccccgtctccactcaaaatacaaaaaaaaattagccgggcatggtggcaggcacctgtagtcccagctacttgggaggctgaggcaggagaatggcgtgaacctgggaggcggagcttgcagtgagcggagattgcaccactacactccagcctgggtgacagagtgagactccgtctcaaaaaaaaaaaaattgccaagcatgctggcatgcacctgtagtctcagctactttggaggctgaggccagaggattggttggggctgcagtgagccatgatcacacacaccactgtactccaggtgacagagcaagaccctgtctcaaaaatcaatcaataatacaacaatttttaaaaatataactgtttacatagcatttatattaggcattatagatgatttaatgtatgcaggaggatgtgtgtgggttgtatgcaaatgctacacccgacaccattgtgtaagagacttgagctggataccaagggacaactatatgacctgtagaaaacttaaagaaaagcacaggccaggcgtggtggctcactcttgtaatcccagcactttgagaggccaaggtgggcagatcacctgaggtcaggagttcaagcccagcctggctaacatggcaaaaccccatctttactaaaaatacaaaaattaaccaggtgtggtggtgggcgcctgtaatcccagctactcaggaagctaaggcaggagaatggcttggacccaggagtggaggttgcagtgagctgagaccacactattgcactccagcgtgggtgacaaaagcaaaactccatctcaaaaaaaaaagaaaagcacaaagaggccaggcacggtggctcatgcctgtaatctgaacactttgggaagccaaagtgggcagattacttaaggtcaggagttcaagaccaacctagtcaacatggtgaaaccccgtctctcctaaaaatacaaaaattaacagggcatggtggtgggcacctgtagttccagctactcaggaggctgaggccagagaatcacttgaacctgggaggcagaggcttcagtgagctgagattgcgccactgtactccagcctgggtgacacagctgagacctcgtgtctcaaaaaaaaaaaaaagaaaaacataagaaaacaacgcttgccaggcgcggtggctcacccctgaaattccagcaccttgggaggccaaggcaggtggatcacctgaggtcaggagtttgagactagcctggccaacatggtgaaaccccgtctctactaaaaatacaaaaattagctgggcacggtggtgcgcacctgtaatccgagctacttggggggctgaggtgggaggatcacttgaacccaggaggcaaagactgcaatgagtctttgagaaagcagaagctgagtctgatagaacttagcccgtgaccttaatgggtactcggcagatgcagctgcctggctgattagagaacaggacaggcatggaccctgctttcggagcagtgctgtggaatagaactttgtgcagtgacggaaatgttctgcatcttcactctcccttatgatggtcagtagccacgtgtgaaatgtatctaatgggactgagaaactaaatttttaatttaagtagccacaggtagctagtgattaccatagcaaatgctgcagttccccaggtttttagtcttgattatacctcccagaagtcgtctgctccaaaggtcaacagttcagcaggaagcagagcccatgcctttgagaggctggaggtattgcatactcccaaaaatcccaggggctcactcataatgagcccaacagtgcagaagagttctgggctgttgtttctaaaatgcaagcatacagccttcctcctctcccattttcatttagacctgtactaacagaattctggcattacaaattgttttgtattttgatgtcttcagaataaatatataatgtgcttcataattgaaagcaattttgatggttttaaaatcaacattttttgtgttgctaccttgtgctgagacttgtgctagatagtgaggataccaagaaaaataagcacagggattttgtgttgttcatctttatctcctcagcatctaagataatacccaatgcatagtgggctctcagtagtgtttggtgaactaataagcgaaagatataatcgccactgtcaaagcactcactcactatgtggtgggggccaacagacaggtacagatgtgttcctggtgtggagaaagtgccagggtggctcagcgaagaaaaaagaattcttgtggtgctatcaagcaaggcttcatttgagggaaaagtaggatttctgtaggtggaaaaagagaagacattgatttgaaactccctggttgttttataaacttcatattagctatgtccacagagcctccaaaaggatataattcaaaagggattttaaccaaaatgaaatatgttgtgactaatagatacagtttatttgaatgaatgatagtttttcccatttgatattttaactgtgctacacaagaatgagagtagacatagctcgatttgtagtctcattgttctgtcttttctgcccatttcagtgacccaggactctttgtttattgctgtgatttttcttccacagctatagaactggtccaggtgagtacaatgggaaattacctattggtaatttccactgattaaagggaaaaggttctcctaaaaatcaaggtctctggctgtgttcttatacagtctgtgttcttacggtctaaaagtaaaagatttactgataacgagcataccttgttttattgcagttcactttatcacactgtatagatgtcgtatctgttcatatattgaaagtttgtggcaaccctgcatcaagcaagcctaccggtgccatttctccaccaccatatgctcacttagtatctatgtgtcatgctttggtgattctcagaatatttcagacttttttactgttatgtatgttatagtgtgtgatgttactgttgtacttggtttggggttccacaaatcacatctgtgtaagacggtcaacttaataaatgcatgcgttgtgactgctccaccaacctgccattccatttctctccctctcctcaggtctccttgttctctaagacacaatattgcaattaggccacttcatactctacagtgtcctctgtgtgttcaagtgaaaggaagagtttcaccacgttgcccaggctggtctcgaatgatagcttacacttgtgttgtaattattaaatttaatacacaattgcataaactaatgaaatacgattgcatgctggtgcggtgactcatgcctgtaatcccagcactttgggaggccggggtgggcagatcacgaggtcaggagttcaagaccagcctgaccaagtgaaaccctgtctctactaaaaatacaaaaaaattagccgggctaaaaatacaaaaaatggcgcatacctgtaatttcagctactcaggaggctgaggcaggagaatcacttgaactcaggaggtggaggttgcagtgagctgagatcgcgccactgcactccagctagacaacagagtgagactccatctcaaaaaaataaaaatacattattggtcggccacaatggcttaatgcctgtcatcccaacactttgggaggctgaggcagacagatcacttgagatcaggagttcaagactggcctaggcaacatggtgaaaccccatctctactaaagaaaaatacaagaaattatccaggcatggtggtgggcacctgtagtcccagctactcaaaaggctgaagcaggagaatcgcttgaactggggaggcaaaggttgcagtcagccaagattgtgccactgcactccagtctgggcgacagtgagactccatctcaaaaaaaagagagagaaagaaaaaaaaatagtttattgctaaaacatgttaataatcatctaaaccttcagcaagttgtaatctttgctagtggacggtcttgccttgatattgatggctgctgactgatcagggtggtgattgccaagggttggggtggtcgttgctaagggctggggtgactggcaatttcttaaaataaggtaacagtgaagtttaccgtatcatttggctcttcctttcatgaaagatttctccgtagcatgcgatgctgataggattttgcccacagtagagcttctttcaaattgaagtccattctctcaaaccctgctgctgctttatcaactaagtttgatgccatttcaaaacaaaaaacctttcttgccatttctaaacaatgttcatagcatctttactggagtagatttgatctcaataaaccactttctttgcccaaccgtaagaagcaactccttatagataaggatgctggtttaaaaagaaagaaagaaagaaagaataagactaaaaaacaagcagcaacaagattgcagcaattcagtcacatcttcaggcttcactttttttttttttttttttttgagacagggtctcactgtgttgcccaggctgaagtagagtgacacaatcatagcccactgtagccttgaattttgggctcaggcgaacctgatgagatgattccattggggttctttgagttacaagtaacagaaacgtctagacaaactcaaagcaataaagtagaatgtcatagaacctaagggcacaaaatacagccccaagttcctggtatcttacctgtcattgtccagggcccatttgttttttccctctttgcataccagttttctctagtcagtatttcctaattttgcacgcggccccaacgtgcttgctcctcccagtcccttacaagctcaccctgttcaggggttcatggtgcctcactaaaatgattgtgtcccagttctgaagtccctggaaagtctagttaacacaacctagctgataaatacagcagccctgtttgaatcagctttggccaatgagaaacaaactcacatatttgcagaagacggacattgagggtagatgccttaaaatgtatctgttatggctggggtcagtggctcacacctgtcatcccagcactttgggaggccaaggccagcggatcacgaggtcaggagttcgataccatcctgaccaatatggtgaaaccccgtctctactaaaaatgtgaaatttagctgggtttggtggcacgcacctgttgtcccagctacttgggaggctgaagcagaagaatcgcttgaacccaggaggcggaggttgcagtgagccgagatcgcaccactgcactccagcctgggtgacagagcaagactccatctcaaaaaaaaaaaaatgtgtctgttacaattggccgggcatggtggccagcactttgggaggctgaggtgggcagatcacttgaggtcaggagttcaagaccagcctggccaacatggtgaaaccctgtctctactttaaaaaacacaaaaactaggccgggtgcagtggttcatgcctgtaatcccagcactttgggaggctaagacgggcagatcatctgaggtcaagagttccagatcagcctggccaatatggtgaaactccatctctactaaaaatacaaaaattagccaggtatggtggtaggtgcctgtagtcccagctactcgggaggctgaggcaggagaatcgcttgaatctgggaggcagaggttgtagtgagccaagatcacgccattgcactccagcctgggctacaagagtgaaactccatctcaaaaaaaaaaaaaaaaatacaaaaactggcaggacgtggtggcatgcacctgtaatcccagctactggggaggctgaggcaggagaattgcttgaacctgggaagcagaggttgcagtgagccgagatcgcaccactccagcctgggcaacagaacaagactctgtttcaaaaaaaaaaaaaaaaaagagtctgtcacaattatgtacaatgctgttagggcagattaggaattggtagtgccatgcttttagaattattattcagttaaagaccaaatgaatattgaagcctacctttacttcagtttttgataacaaagtaaattttctacatctacagaaatagattttcctgaagaattctatggtttgtgtaatattttctagttgggagttgttttaaatcgtgtgctttgttgtttgttttgagacagggtctcagtcactcaggctggagtgcggtggtacaatcaaactcactgtggccttgatctcctgggctcaagtgattctcccacctcctgtgtaactgggactatgggcacatgccaccacacttggctaatttttttttttttttttttttttgcgacggagtctagctctgtcgcccaggctggagtgcagtggcgtgatcttggctcactgcaacctccgcctcccaggttcaagcgattctcctgcctcagcctccagagtagctgggattacaggcgggtgccactgcacccagctaatttttttgtatttttagtagagacggggtttcactgtgttggccaggctggttttgaactcctgacctcaggtaatcctcccacctcgacctcccaaagtgctaggattacaggcatgcacccggcatttttttattttttgtagagatgaagtctcactatgttgcctagctggtctcaaactcctgggctcaagtgatcctcctgcctcagcctcccagggtgctgggattctaggcgtgagccaccgtgcctagcagatcgtgcttttggtttgtttgtttgtttgtttttgtttttgtttttgagacggagtctccctctgtcgcccaggctggagtgcagtggtgccatctcagcttactgaaagctccgcctcccgggttcacgccattctcctgcctcagcctcccgagtagctgggactacaggcacctgccaccacgcccggctaattttttgtatttttagtggagacggggtttcaccatgttagccaggatggtctccatctcctgactcatgatccgcctgcctcggcctcccaaagtgctgggattacaggcgtgaaccaccgcgtgcttatttaaagtatgtgctgtctctctccttacgaatgtttttttttccctgttggtcactcattttcatgatcgttttccaattcttagatctgacttcatgcatgagaagtacagaaagtacacaagaataaagaataaaagtaggggagtcaggaatgttctattttaaaagcaactattagattcctcactgtctcccttcaattattcctgatctttactctttgagtcctccctgaaataacatgctattagattgatgcaaaagtaattgtcgtttttgccgttactttttttttttttttcttttttttagatggagtttcactcttgttgcccaggctggagtgcaatggtgcaatctcggctcactgcaacctctgcctcctgggttcaagcgattctcctgcctcagcctcccgagtagctgggattataggcatgtgccaccacacccagctaattttgtatttttagtagagatggggtttctccatgttggtcaggctggcctcgaactcctgatcttaggtgatcctcccgccttggcctcccaaagtgctgggattacaggcatgagtctccacatccttgccattactttcaatagcaaaaaccgcaattactttttcaccaatctatataatgattagaaatatatcccctactctggagggtgaggcaagtgatcctatcgcgtgaacccaagagtttgaggccagcctgggcaacatggggagattttgcctcaagaaaaaaaagaaaaaagaaatatatccctctttgtgaagtagcaacagttacatttaaaatttaaaacaagataatcttttctttaggctatgttaatattttctaacttacctgtgtcttccatctgtctgcagacaaattcagaatatgatccttctcggtgttttgcctttgttcacgacctgtgtgatgaagagaagagttacccagtgcccaagggcagtcttgatattatcattctcatatttgttctttcagcaattgttccagacaagtaagtttgggtcccttggctggtagtgtcacaaaaaggaagctttggtgagggacctttttttttaaaataggttcttgctctgtcagcccaggctggagtgcagtggcacgatcatggctcactgcagccttaacctcttgggcttaaatgatcctccctcctcagcttcccaagtaggtgggaccacaggcacgtgccaccagtcctggccaatttttgtgtttttagcagagatggggttttgccatgttgcccagactggtcttgaattcctgggctcaagcgatcctcccaccttggcctcccaaagtgctgggattataggtgtgagccaccatgcccagcctggcgagggaccttgatattagagttgggctcaaagtaaaaagagttttgtttatgttctgatagacacaaagaagccacaccatttgtagtgatgtgagcatctcagccattttcctaaatttgtcttgatgtccaacttctgttctggcctcgaaacttctgcagtagttggttcttcatttccttgttgtggctcaacattgggaaagaatgggaaatcagtctctaatgagtatgtggggaaattcctattgatagtctcatcacatgccgttttagaactgtgaactgtgggtgtcacagctcttaggtaatgtctcattattggatttttattttattttattttatttttttgagatggagtcttgccctgtcgcctgggctggaatgcaatggcgtgatctaggctcattgcaacctccacctccccggttcacacaattctcctgcctcaacctcccgagtagctgggattacaggcacctgctaccatgcccagctaatttttgtatttttagtagatgcggggtttcaccatgttggccaggctggtcttaaactcctgaccttgtaatctgcttgcctcaaccttgcaaaatgctgggattacaggcatgagccactatgctggccttttttttttttttgaagacggagtcttgctctgttgccccggctggggtgcagtgatgagatcttggctcactgcaacctccacctcccgggttcaaccaattctcctgcctcagcctcccaagcagctgggattacaggtgtacgccaccatgcctggctaatttttgtattttttttttttagtagagatggtgtttcaccatgttggccaggctggtctcaaactcctgacctcatgacctcatgatccgcccgccacggcctcccaaagtgctggaattacaggcgtgagccaccacgcccagcctattggccttttaaatgctttaaataaaacaaccttattagcaacatgaaatttacattgaaccttaactaaggtgttctctgatgcttacagtgttttaggaaagtgtgatacagaattctataaaatcagattcagattaaaggaaagtcaaatgctatatcctaaaatacaccattaaaacttcatatgcataggtaaccagtggtcctgtgacactaccttctcttttttttttctgagatggagtctcactctgttgcccaggctggagtgcagtggtgagatttcagttcactgcaacctctgcctccaaggttaaagcgattctcctgcctcagcctcccgagcagctgggattacagacaagcaccaccacacctggctaatattttttgtatttttagtagagacggggtttcactatgttggccaggctggtcttgaactccttacctcaagttatccacccacctcggcatcccaaagtgctgggattacaggcatgagccactgcaacctgaccaaaactaccttctcaaggaagcagagtcagatggtggctcagagattcagataccattgactaattccatggaagcccttggcactgccagagtgcagtgagtctggacaggctgggggttggcacatgttagggtaaactatacccatgaaatcatgagattagagacttcaaacatctcctcattctgtgtcatcagagtcctgcaaaggatgattaagtaagttagtgttaaaggtcaaggtaagctggtgttaggaagccagattacatgactagagactgcagggaccagtgattgagatcctggtttatctcccagagtccaaggacccctcactggctgcacaggataggagctttgggtgattgaccttcctctagaaggccacacttcctctagaagggtactgaagtcatccaacctgagaggatgagtgtgaaataaaggcatatgcaggataacccaaaaggcctaccatggttttaaactttaataattgcagaggttgaccaggcacagtggctcacgcctataatcccaccactttgggaggctgaggtgggaggagtgcttgaagccaggagctcaagaccagcttgggcaacaaagcaggaccgttatctctactaaaaataaaaataaaaaaatttagccaggtgcatatctgtagtcccagctactcagaaggctgaggcaggagtatggcttaagcccaggagtttgaggctgcagtgaagtgagctacgatcacaccactgcactgcagcctgggtgacagagtgagaccctgtctcaaaaaaaacctatgaccttagaagtttcaatgctacaaactttttaaaaattgacatggactaaaacaaattattaaaatttaaaattcaagccagacacagtggcacacacttttagtcccagctacctagagactgaggcaggaggatcacttgagcccaagagtccagccgaggcaacatagcatagcaggaccccagctgttttttgtttgtttgtttgttttctgagatggagtttcactcttgttgcccaggctggagtgcagtgctatggtcttggctcactgcaatctccgcctcccaggttcaagcgattctcctgcctcagcctcccaagtagctaggattacaggtgcctgccaccatccctggctaatttttttgtatttttagtagagacagggtttcaccatgttggccaggctggtctcgaactcctgacctcaggtgatctgcctgccttggccgtttttttgttttttggttttttttaagagggaaacattcattatgcaaaatttaaatagactttgaaatttttttggtgaagtttgtagcatttagacttctgaagttatgaaagcttcaacctgcaccaagacttttgaagaacactgcatatggaaaacacagacctaagtgtaaaaccctctgtctgttatactcatttgcatactgattgtattgtaagttcttgaggacaagtcttcatttaacaaacagaaagatacagcccctacattgaaagagctcaggtctaatgatgcaggcagataagtcacctagcagaacccactggatgctcaggattcagctcagccacaggcgcacagggcaaagatggctatctaggacagtggggaagtgagccagatagagagcagagaacttttgtttgtttgtttgttttttggagacaaagtctcagttactctgcggcccaggccggagggcagtggtgcaatcttggctcactgcaacctccacctcccaggttccagaaattctcctgcctcagcctcctgagtgtctgggattacaggcacacgccaccacacctggctactttttgtatttttagtagagatggggtttaaccattttggccaggctggtctcaaactcctgacctcatgtgatccacctgcctcagcctcccaaagtgctggtattacaagcatgagccaccgcacccggccaggagcagggaactttcttacggcagaagcgggctgtcctcgggccccttcaggctgaaggcagtggatcgaggccacagctgtgagcaggcagctaatgtccttcagttctaactgaagcaagagtagaggagcttagatctcagacttggtgtgtcagttgaggaagtccactggctttttgggatatgctacagggaaagagaaccccgtctttaaggagacctgattgaccgtcattccctgctgctccacaggatgcagaaggctatcaacaggctgagcaggcttctgaaacctggcgggatgatgcttctgcgagattacggccgctatgacatggctcagcttcggtttaaaaaaggtattttgaaagtgctgaatcctaaccactagagatcatgtcctttgcagggacatggatgaagctggaaatcatcattctcagcaaactaacacaagaacagaaaaccaaacaccactttttctcactcataagtgggagttgaacaatgagaacacatggacacggggcggggggcatcacacactggggtctgtctgggggtgagggggctgggagagggatagcattagcagaaatacctaatgtagatgacgggttgatgggtgcagcaaacctccatggcacatgtatacatatgtaataaacctgcacgttctgcacatgtaccccagaacttaaagtataattaaaaaaaaaaaaaggtatttggccactataatcaaaaaatggtgctgccatcagaatagaaactctagaattagaactccttatataaagccatttaatatgtgacagagtagtatattttttaagaaaactgaagaggcttgtataatctagatattgaggtctttttaagcaagacagctacctttagaagagcttttattagaaagacatttgaaagacagccgggcgcagtggctcatgcctgtaattccaacactttgggaggccgaggtgggtggatcgcctgagttcaagagttcaagaccagcctgaccaacatggagaaaccctgtctctactaaaaatacaaattagctgggcatggtggcgcatgcctgtaatcccagctactcgggaggctgaggcaggagaatcgcttgaacccaggaggcagaggttgcagtgagccaagatcacaccattgcactccagcctgggcaacgagtgaaactgtctcaagaaaaaaaaaaaaagatatttgaaagacataaataattttaaatgtggcatgacaaaagatgccattaaaaatgtaaaaggcaaatgacggagtaagaaggaatattttcagtgcatataatagataaagacttaatatctttgctcttcaaggagctctcatgaaactgataaggaaaagatcagtgacccacccaaaaaacaggcgaggagtatttagtcagttcacagaagaacatatctaaatggccagtaaacaacacttcaaggaaataaaaataacgagttagtacttcctattgctggccaattcaaagaaagaggtgcattccttcattactggtagaaaaagaaattgttacagcctttttttttgagatggagttttgccgttattgcccaggctggagtgcaatggcgtgatctcggctcactgcaacctctgcctcctgggtccacccgccttggcctcccaaaatgctgggattacaggtgtgagccactgtgcccagtgttacagcctttttttttttgagacggagtctcgctctgtctcccaggctggagtgcaatggcacgatctcggctcactgcaacctctgtctcttgggttcaagcaattctcctgcctcagcctcccgaatagccgagactacaggcatgtgccaccacgcctggctaatttttttgtatttttagtagagacagggtttcaccatgttggtcaggctggtctcgaactcctgaccttaggtgatccacccacctcagcctcccaaagtcctgggattacaggtgtgagccactgcgctcggcttacagcctttttttaagcacccaattattgttcaatccagtcattttttttgaatatagtcaagaactagcacataatacatgcaggagcaaaactttgtaaacaaagtgaatgcctctggatagggagatgttgtgcttgtcacctgaggtggaccccgtaccactgaacttggagggatttctgttctgtattcagtgagaggagagcaatgtgcaagggagtattttaaactccatccccctataccagtatctgcagggaaataagtacacacttgtgtgatgatttgggcattcaggaaggtctagaagtatgtgccaggccggtaaactgaggtaaggtcagggaggttagcagcagaagggaaagcatgttcatgatcaaaacaatatctgagttgtatttatgattctgtagacatgtgaagagacatgcaaaggacagtcaccaccaaaatggtaatgattgtctcaagtttccttaaactcagctatattgcttaattaaaaaaaataaaaataggccaggcacggtggctcatgcctttaatcccagcactttgggaggccacggtgggtggatcacctgaggtgaggagtttgagaccagcctggccaacatggtgaaaccctgactctactaaaaatacaaaaaattagctgggcatggtggtgggaacctgtaatcccagctacttgggaggctgaggcaggagaatcacttgaacctgggaggcagaggttgcagtgatccgaggtcacgccattgcacccagcctaggcaacaagagcgaaactccgtctcaaaataaataaataaataaaaagtttgtgctgttaatttaatggggttgggagagtgaacaagttgttttcatcaaacaattctagagttttggagtggggtgcttaggaacgtcatgttttctgacattgtgacttactcctgttgagctgctcttcccgaagcactgaggcaggagtgctctccacccaacaaactgacctcccagttaacattccttagcaatgcgagtcaaagaagtgcttttaagtgtctctgatttttaacacatcactctgcaggtcagtgtctatctggaaatttctacgtgagaggtgatggaaccagagtttacttcttcacacaaggtatgaaacacccatctttttacactaaaagtccccagtaccagatgagatggtcttcaaggcacgttcagaaggaaaactatctggtccctcctgccttttaggcaggctgtttcctgcggttccctgctgctcacaccctcttccaccctgggctaggctacccatggcagccaggcactggggcccccaggcagccctggcttgtccatgccttcagtcctgctctgctctccctgtctgccactgtccaaaatgggaagcctgcccactctgcaaggctcatctccagtccagcctgtttcaccctctacacggggttgtgctttggtgtgcccgggtcagggtgaaccctgggttctaggggtgctgggaactgctctcctctgcaactggcctatccacaggcttcatccttcacctgggccttccaaattctccgttcctgggcccttttcagggtcaccttctttgagcctttggttaagatgatgaaaccactttcctaaaacaattgctttgacatacatagatatttttgcataaattttaaggtgttcatagagcctaaaggccaaatataaaccaaaggtttttaaaaaagaaaaaaccgcggcccatacgcagtggcttcccctacctaaacatgaacttactgttaccaagccaccactgcatttataaccaaatggccatgtaaaaaacatgacagcaacttcccagagccccttttaacaaggacttagtagataaaaatgccttttcttgaggggaaaaatgcataaacatcttttattttccacactagaggaactggacacgcttttcaccactgctggactggaaaaagttcagaacctggtggatcgccgactgcaggtgaaccgaggaaagcaactgacaatgtaccgggtttggattcagtgcaaatactgcaagccccttctgtccagcaccagctgagaggcacctgctgccaacacgatgcaagcccattgtgtttccgggcttttttaaaaaaaaaattgtagcactgggcgtggtgcatgcctgtaatcccagccactcaggaggctgaggcggggaggatccattgagcccagcagtccaacctgggcaaaatagtgagagaccctgtatctgaaagtaataataaaaataaaaaatataaatgaggtctcgttgatgttggacaattcaagaattcagacttgaaccttaaacctaggaaaagttactttgtatcaggattctaacaattatgcttcatatttgtgaagtcctttaaaacataattttctcaagttctttctttgagatctcaatctgtcttagcattttgtaactaataactgaaattttattcaaaggaattgtaaaccttaaaccaccaatttatttccatgtgaaaaagtgttacatatgacaagtgttttttgactgtaattgcgttaaatcttttgagaatgtaaatgccgggctaggcaattgcagttaatacatacagaggttagtgaagggcttattaagttgtaggggaagcaagctgggaagaatcagatcagatattttcctgacaaaaaaaaatgaccctacagagagcatcaaaatgtggtgttcttgttaagtaattgatcgtggtcttcgctttaatcttagttccgccaggcacggtggctcacacctgtaatcccagcactttgggaggccaaggcgggcggatcagctgaggtcaggagttggagaccagcgtggccaacatggtgaaaccccgtctctactaaagataaaaaaattagctgagtgtgttggtgggtgcctgtaatccagctacttgggagactgaggcaggagaattgcttgaacccaggaggcagaggttgcagtgagctgagattgtgccactgcactccagcctgggcaacaaagcaagactctgtctcaaaaaaataaaaataaaaaaaaaatcttagttccatggaattttaagcattgttccccctctaacctgtgtctaaagaattaaaagaatttggccgggtgcggcagctcatgcctgtaatcccaacactttgggaggctgaggcaggcggatcacgaggtcaggagatcgagaccatcctggccaacacggtgaaacctcgtctccactaaaaataccaaaaaaattagctgggcatggtggcacacacctgtagtcccctgtagtcccagctactcgggaggctgaggcaggagaatcgtttgaacctgggaggtggaggttgcagtgagccaagatcatgtcactgcattccagcctgggcaacagaggaagactccgtctcaaaaaaaaaaaagaaaagaattttcactttttgcaaaattatcttttttaatgcacccttaagtgtttgacacaaaaggaattgagggaacttcttaattttaaccacatcatcacttcacttctgaatgtgatcattatcagtgttagatgcctttttttttttttttttttttttttttttaaggagacagggctctcactttgttgcccaggctggagttcagtggtgcaatgatagctcattatcacctcaaacttctggctcaagccatccctccgcctcagcctcctgagtagctaggactgcaggtgggcaccatcatgcctagctaattgttagatcctttttttttatgttctgcattttttcagttatttttacatatttctctcttgatccatgcagttataggatatatccttaattttagaaagtaaggacttttcgaccaggcgtggcggctcatgcctataatcccagcactttgggaggccgaggtgggcagatcacttgaggtcaggagttccagtccagcctggctaacatagtgaaaccccgtctccactaaaaaataaaaaatcagcccggcatggctgtgggcgcctgtaatcccagctactcaggaggctgaagtagaattgcttgaacctgggaggcagaggttgcagtgagccgagatggtgccattgcactccagcctgggtgacaagagcgaaactgcatctcagaaacaaagatgcctagctttcaccttgttgatgtttttctaaattttggaataataaatttatataggaatactgcaagaatagtccatttttttctgatgtcccaacatcaccaaatgtatccatcacaagtaggaatacatggaaacattaatgccagccactaaccattcatgtttacccagtagtcccaataatagctttgtcacacaaaaacatgattatgttggctgggcacagtggctcctgtaatcctagcattttgggagcccaaggcaggagttcaagaccaggctgggtaatgtagcaagaccctgacttttttttttttttttttttgagacagagcttcgctcttgttgcccaggctggagtacaatggcacaatttcagctcaccgcaacctctgcctcccaagtttaaatgattctcctgcctcagcctcccaagtagctggaattacaggcatgtgccaccattcccggctaattttttgtatttttagtagagacagagtttctccatgttggtcaggctgatctcgaactcccgacctcaggtgatctgcccgccttggcctcccaaagtgctgggattacaggcgtgagccaccacgcccggccaagaccctgactttttaaaaaatgttaaaaataggccgggtgcggtggctcacacctgtaatcccagcactttgggaggccaaggtgggcggatcatttgaggtcgggagttcgagaccagcctggccaacttaatgaaaccccatcactgctaacaatacagacctggcacggtggctcacgcctgtaatcccagcactttgagagaccaaggtaggtggatcacctgaggtcgggagttggagaccagcctgaccaacatggagaaaccccgtctctactaaaaatacaaaatagccaggtgtgatggcgcatgcctgtaaccccatccacttggaaggctgaggcaggagaatcacttgaatctgggaggcggaggttgcagtgagccgagatggcaccattgcactccagcctgggcaacaagagtgaaactccgtctcaaaaaaaaaaaaaaaaaaaattagctgggcatggtggtgggcgcctgtaatcccagctatttgggagggtggctctagagaatcatttgaacctgggaggcggaggttgcggtgagccgagatcgcgccattgcactccagcctgggcaacagtgagactccgtctcaaaataaaaaacaaaaaaaatgtaaaaaataaataattgtattgaatttattagttgtgtctcagtctccttcagtctacgggttaggcttgcttttgcacctttgcattttaaggtaagaggctattgtgtaaactcgaattgggtttgttggtgtttcttcatgatttggttcaggctctgcattttgggcaggaatattcagaggtaatgctgtgttcctcccataggatcgtatcaggcgacacatgattatgaatttccccattattggtgatgtcacttagttgtgttgtctgccgggttctgccactgtaaagttaataagtattttgtagggaagtgctttgagactaaatatcctgttcctcatcaaacttctaccccctagtttcagtatctattgctgctttttggctgaataactatgatagttgccaaatagtggtttctgatgcttccattccttctacactgattggttggtattttgtacagaaaagctttctcatatctgatttacttgtctcaatatggacccatgggtatttgagtttcttgtggggttatttgttgttgtttttgagacaggctcacccaggctggaatgcagcagcacgatcactgctcactgcagcctcgacctcccaggctcaggtgattctcccaccccagcctcccaagtagatgggactacaggcatgtgccaccaagcctaatttttgtattttttgtagagacagggtttcatcatgtgtcccaggctggtcttgaactcctgagctcaagcaatcctcccacctcggcctcccaaagtgctgggatgagccactgcgactggccccacttaatgggttttcagaggtgggagcaaagaatgaagggaggaagagagctcccatcttttccattactgtatttacttaaaactggaaaaaactgaatcactgggatggtatttcatttatcttttgaaatgaagaatagatacattaatttaaatgattctctaaagactgtccttcagcatccctaaagcatttcaacactataggcacagtttttattttatctttctggcacctggtttgggctttgggcttagattaaaaagacgagccttctcctgcccctgctcccttttattctctgccatctgctaagctcgactttttatctctcaggccaaatttgactctgcaagggactttgcataacgtttcatcctcagaatcgctaatgatgggcagaggactgttacatttgttgggagggattaaagtatatgacctcagtgccacttaaaaaataaatactgtctcaactatgagtctggctctgaatggtatctcttaatatgcttaatgcaagaatggtgggtcgggcgtggtggctcatgcttgtaatcccagcactttgggaggccgtggctggcggatcacctgaggtcaggagtttgagaccagcctggccaacatggcagaacccatctctactaaaaataaaaaataaaaaaatttagccaggcatggtggtgggagcctgtaatcccagctactggggaggctgaggcaggagaattgcttgaacccaggaggcggagattgcagtgagcagagattgcacaccagcctgggtgacagagcaagactccatctcaaaaaaaaaaaaaaaaagaaaggtgctatgcggggctggaaggtggctccaggtgtgaagctgctcaggaagttgtgtggtttcagtgtgaatctaacagaagtgtttctgaaactgatttacctttctaagtcgtgttaattagggtgagagataaattcaatgttgtttgaaaaatgagagacagtttgagacagatgcactggagctattggagtgaaaccatgttcctgagggcagcgatcaccctgaaagtgggttttgcactgtgaaagggattcatctcctggtcttgcaggattcatgcagagcctggcctctgttaatgctatcaaacctatgtacaatgggtcagccacctcttttcatataagttcatattctcttgggctctggtaggaaaattaggacttggaaacttagtgagaaagggaaaatctaacgtgctaagacatcctacttggatgtaattgattcctatctttgcttaaagacatactttagtaggagtaaggagttctctctgtggcttaaaagatgagctcaggacaagcagtttctttcagtctgttcacaaaggcctgttctttggtttgtggctgcagctgctattttcagagcctggctgcgttgatgcgttgcagatttgtgtgtgcttcctactttggtctacaggttgtgatttgggaaccctggttaagaggtagaagaagtgctcatggtgaatttcccaggtgaaaacactgaaacattgcatcatgactgcctcattttatttaaataagtgtcttggctcaaggttggacattgtctctgtagccagtgaaacacactccatgaccaggtttcaggacaaatcaccacagtccgatttaataccccactggggaccctgagacatggtagccttgactccagcctcaagcttggcatctttacccacagatgagcctcacactgccttcattcattcattctctacttccattctctgaatttggattttgccattaaaatttaatgttatagccaggtgtggtggctcacacctgtaatcccagcactttgggaggccaagatgggaggatcgcttgagtccaggagttcaagaccagcctgggtaacatagcagcatcctgttcatacaaaaaaataaaaaattagccaggcgtggcggtgcctgcgtgtagtcctagctactcaggtggctgaggtgagaggatcgcttgagcccagaagttcaaggcttcagtgagctgtgatcacaccactgctgggtgacacagcaagactccgtctcaaaaaagaaaagaaaagagagagagatagaaaggaaagaaggaaggagagagggagagagaacgaaggaaaggtaagaaagaaaaagaaaagtagccgggtgtggtgacccatgcctgtaatcccagctaccgggggagccgaggcaggagaatagcttgaacccaggaggctgaggtttcagtgagccgagatcacgccactgcacttcagcctgggtgacagagtgagactccttcaaaaaaaaaaaaaaaaaaaaaaagagagagagaaagggaagaaggaaagaagggagggagggaggaacatttatcagcagtggcacgcttgagaaaccctctaagggtgagcagaatggcgagggccctgaagagccctgctactgacaagcccccgtcaccctcttcagccttgcttctcattacccctcaatattttgtggacgattaaggccaacattcaatcgagctcattaaattatgagtttctgacagggtgcagtggctcatgcctgtaatccctttggaggccaagacaggtggatcccttgaggtcaggaattcaagaccagcctggccaacatggtgaaaccctgtctctactgaaaattacccaggcatggtggtgagtgcctgtaatcccagctacttgggaagctggggcaagagaatcacttgaacccgggaggcggaggttgcaatgagctgagatcctgctattgcactccagcctgagtgacaagagcaaaactctgcctcaaaaaataaaaaataaaaaaggccaggcacggtgggtcacgcctgtaatcccagtactttgggggtccaaagcaggcagatcacctgaggtcaggagttcaagaccagcctggacaacatggtgaaaccccgtctctaccgaaaatacaaaaattagctgggcgtagtggtgcacatctgtaatgccagctactcgggagactgaggcaggagaatagcttcaacctggaaggtggaggttacagtgagccgagatcaagccattgcattccagcctgagtgacaagagtgagactccatctcaaatacatacatacataaataaataaataatgagtttattgggggaccattgtattctaaacacagcagactaccaaagcccgcggcccatggtcagtgcccagtaagtggggactgaatgcccgaatagcttcttcctaccctgcccgctgccccccaccactgcacagacaccccggatacacagcttgtatttaacttaaaaaaaatcatacaaggttgcaaatatcaacagctcaaggtggcttaaacaaaaaacaacagtagaagggcacagggcgcctcctggaccccaccctgggaggtgtgtggttgctctcactcctgcagcctctttaaggaccacttctctgctccttagtgcacttgtgggaggcagctgtaaccaagctcctgaggtttgatgtctctgtaaaatgggtgtgcagcatgtgcatgtgtgtgtgtctaggcaggcagttcccacaatggcaggcagaatccccaaaaaggcatccgtaagagcatgatttcctagacttcagctggtttatttcatcttcccaaatattgatatccgagtagaccattattgaatctttttacattatgtatatttttgaccaggcgcagtggctcacacctgtaatcccagcactttggaggccaaagcaggcatatcacctgagcccagaccagcttggccaacatagtgaaaccccatctctactacagaaaaaaaaaaaatacaaaaatcagctgggggggggtggtgcttgcctgtagtcccagctactgaggaggctgaggcaggagaatcgcttgaacccaggaggcggaggttgcagtgagattgtgccactgcactccagcctgagtgacagacagagtgagactctatctcaaaaaacaaaaaaattttttaaaaatttatatttttacttaaatgtgtttatttgtttttattattattttttgagatggagtctttctctgtcacccaggctggagtgcagtagcacgatctcagctcactgcaacctccgcctcccagttcaagtgattctcctgcctcggcctcctgggtagctgggactacaggtgcgtgccaccacgcctggctaattttttgtatttttagtagagacggggtttcaccatgttggccaggatggtctcaatctcttgatctcgtgatctgcccacctcagcctcccaaagtgctgggattacaagcgtgagccactgtgcccggccttaaatttatttttaagggatttttttaaaatcactgctataaaagtaaaacaagtactggttgccatgaattgaaagtatttgtgggccatgtgcagtggctaacccctgtaatcctaacactttggggggccaaggtgtgaggatcacttgaacccaggatggcttaaaccctttgaggagtttgaggcaagcctgggcaacatagtgaggccccatctctatttaagaataaataaataaaaataaaaatgtattttaaagataaatacaatgaaaacaaaacaatatcttaagttccagctggatgcctttggggccaaagacttggagcactaggtctggaaacaggagtgaacgcatcagtcacacctttcctggagctgtcaaatttggacggggagattccaacaataaacccataaatcctctaacacgtgggcatgtgccaggaagaaccaagcaagctagggaaaatagagaggtggcagggatcagggaaaaggcacactctgaggttgggagtggggacaaggaaggcctcctggagaaggtcacgtctctcatggaacatcttctctgtgggagaaacagccagtgcaaaggcctgaggctcatggtggattctccacccacccagtgtggggaacgctgcatcatcaatcttaagcttggtaccattgctcactctcgtaatgaatgtatctgcctcaagcacattttttttttttcagacagagtctcgctctgtcacccaggctggagtgcagtggtgcaatctcggctcactgcagcctcaacctcctgggttcaagcaattctcgtgcctcagcctccctagtagctgggattacaggcatgcgctaccacacttggctaatttttttgtattttttgtagagacagggtttggccatgctggccatgctggtctcaaacccctggcctcaagtgatcctcctgccttggcctcccaaagtgcttggattacaggcctgagccaccacacccagccctagcacactttaatgagtactacccaagtgcattaggtactgagaaatgagtgagaatgattgccggcttccaatcaaccctcgtgtgcagggtctgggttcttctcagttcatttaggaactgttaaagctgtgaggtcagccccgctcacaagggtctggattatacagcaagattattttgcttttctttatttttccccaccccactaatcgtgctcctaaagcaagattattgatctgtaatctgaaacgtaactgacaagctgaggggatctccccaggaagggaagctacttgagaaactgaatttagatcagaagttgattgttcagaatacagctgagcccagagattgcatggcaccaagagaggtttctgtcaagccgtcccgttccgagatgccccatcgcaccaacgaagcaactgctgagcaggttggcactaacacgagctggcgtttgtccagaccttaagactctttaaatagcttttcatatatttaatcctcacattgcctatgtgaatataagcgtaattatctccattttacagatgaggaaatccgaagttcagggagggtaaatggtttaccaaggtcagatgaccagtgttaatcgtgaggtaattagccttagattagggagaggtagtttgatttaaatgatatctgacataatatacgggtttagacatttttggctccaaccagtgatgccagtccaggaaaatgttacacctgctcagatgttaaccctgctgcgggctggaggagaaggcaccctcaccccaaacctccccaggagaagaaaaccctgcagctatcagaagttttagtaaaacaactatcaacagtccatgcaactggctacataatttgtgtttgtgttgcaacactgtccaaattgcaacattttcatcaaaatagaaaactgaaatcccccatctttaccctatgggccaggtcctcctggggtgaagggggagctgggatttttttttttttttttttttttgagatggagtcttgctctgtcgcccagactggagtgcaatggcgcgatctcggtttactgcaacctccgcctcccgggttcacgccattctgctgcctcagcctcccaacccccaaccagtagctggaactacagctaccacgcccggctaattttttgaatttttagtagagaaggggtttcaccgtgttagccaggatggtctcgatctcctgacctcgtgatccgcccaccttggcctcccaaagtgctgggattacaggcgtgagccaccgcgcctgggcagggggtgctgggattctaatccctcatgttcaaggggttccgtggaggcttcacaggctgtggcctgctcagttgcagaagggcccacgcttgatttcatgccctgcaattgctgtcttgagattccttctccttgcttctttcttttcctttttttttttttttccggttggttggttggtttgtttttgagacagagtctccagtctcactctgttgcccaggctggagtgcagtagcatgatctcggctcactgcaacctctgcctcctgggttcaagcgattctcctgcctcagtctcccgagtagctgggattagcccggcaagaattcatttttttcttttcttttctttttttttttgagacagagtgtcgctctgtcacccagactggagcgcagtggtgcgatctgggctcactgcaacctctgcctcctgggttcaagcaattctcctgcctcagcctcccgagtagctgagactacaggtgcccgccactacgcctggctaatttttgtatttttgggtttttttgttttgttttgttttgttttgagacagggtcttgttttgtcacccaggctggagtgcagtggcagaatcttggctcactgcaacctctgcctcctgggttcaagtggttctcctgcctcagcctccagaatagctgggattacaggtgcccgccaccatgcctggctaatttttgtatttttagtagagatggggtttcaccatgttggtcaggctggtctcgaactcctgacctcatgatccacccgacttggcctcccaaagtgctgggattacaggcgtgagccaccacacccagcctaatttttgtatttttagtagagatggggtttcaccatgttggccaggctggtcttgaactcctgacctcaagtgattccacccacctcggccacccaaagtgctgggattataggtgtgagccactacacccagcccagaattaataataattatttttaacgaggggcccagcattttcattttacattgggtctcacgaagaacccagccagtcctgctgctgcctctttcttgctccttcttcctcctttttcctctccttcacaaagagctgtctgctcttgccttttttttttccttccttctttcttttcttttttttcttgtctttcttttctttctttcttttgacagagtctggctctgttacccagactggaggtgcagtggcacagtcataggtcactgcaattttaattttgaacttctgggctcaagcagtcctccccgcctgagcctcccaagtaactggaattacaagtgtgtgccaccatgcctgtctaagttttttaagagacaagagactgcgtgcggtctcaccatgttgcttaggctggtctcaaagtcctgggctctagtgatcctcccacctctgcctcccaaagtgctgggattataggtgtgagccgtaagccactgtgcccagctctcttgactttttttttttttagacgaagatcactgcacaatcttggttcactgcaacctcctcttcctgggttcaagcgattctcctacctaagcctcccgagtagctgggattacaggcacccgccaccacgtttggctaatgtttgcatttgtagtatgccgggaggacattcccctcccttctgatcctcctccctttctaagcccctctccactctcctcgacccctgggcaccttcaagcaggccttctagacatgccaatcctataccctcaggccttgcccgtctaacagtcgttccctgacctcccacgacccctcggtcccacagcgtcccagggtttgtctttctttcttgattgtctctctccctctctctttctttctttctttctcctctctctttcttttccttccttcctcttttcccttccttcctcccctccctccttccttctcttccttccttccttcctttcttccttaagacggagtttcacttttgttgcccaggctggagtgcaatggcacaatcttgactcactgcaaccgcctcccaggttcaagattctcctgcctcagcctcccaagtagccaggatcacaggcacctgtcaccacgcccgattaatttttgtatttttagtagagatggggtttcaccatgttggtcaggctggtcttgaacgcctgacctcaggtaatccacccgcctcagcctccggaagtgcggggattacaggcgtgagccactgtgcctggctttgcatttcttatgactccttagcagcatccttgttcctgctcacttctgcctcctgcctctagactatgggcttgccccttgggtccggggacctggttgattttgctcacagttgtatcctcagtacctagatttgcctggcacatgaaggtgctcagtaaatatttattgggtgggcaagtgcttagaatgtcacctacaagccatgtccctgagagtgtcaggcaccaaagggaggaaagacaagttttgccactcgatccagcaggaaacagcagggctggcgatggacctcaaaacctgcagaaaggaggggctccctaagtgttccttctaagccacgcattcctgggaaagagcaggacaaaagagccagccagggagcaagcctgtcatggggaggaggctgcatcaggatggtttagacgtgtggaaacaattctaggccccacaagatgacaagggtgaatgagctgatccactttgaatctctaagtgctaccaatacaagaataattcccaaatctatgtcacgagctaaggatctctcttgagccttgaactagtttatctaaataactcctagacatatctctcccctagcagggccccaggcacctcaaacccaatctctccaaagcaacccctaagagcaggggctggggttgaaaccctggggtcaccatttgttctctctgccatcttggccaagttaaagttctctcatgctgttttcttcgactgaaaattgagtataaacaatagaatagggccaggcacagtggctcacgcctgtaatcccagcactttgggaggctgaagtgggtagatcacttgaggtcaagagttcaagaccagcctggccaacatggtgaaatcctatctctaccaaaaatacaaaaaattaactgggcgtggtggtacacgtctgtaatcctggctactcaggaggctgaggcaggagaatcgcttgaacccaggaggcagaggttgcagtgagccaagattgcaccactgcactccagcctggcaacacagcaagactccctcttaaaaacaaacaaaacaaacgatagaacaggccaggcgcagtggctcacacctgtaatcccagcactttgggaggccgaggcgagcagatcatctgaggtcaggagttggagaccatcctggccaacatacagtgaaaccctgtctctactaaaaaattacaaaaattggccgggagcggtggctcacgcctgtaatcccagcactttgggaggctgaggcgggtggatcacgaggtcaggagattgggaccatcctggctaacacgatgaaaccccgtctctactaaaaatacaaaaaattagccaggcatggtggtgtgcatctgtagtcccagctacttgggaggctgaggcaggagaatggcgtgaacccgggtggcggagcttgcagtgagccgagatcatgccactgctctccagcctgggcgagagagtgagactccatctcaaaaaaaaaaaaattacaaaaattatctgggtgtggtggtgcacgcctgcggtcccagctacttgggaagctgaggcaggagaattgcttgaacccggggggtagaggtcgcagtgaactgagatcatgcgccactgcactccagccagggcgacagagcaagactccatctctcaaaaacaaaaaaaaaaaacacaaaaattagctgggtgtggtggtgagcgcctacagtctcagctattcgggatgctgaagctggagaattgcctgaacctgggaggttgcagtgagctgagatagagccactgcactccagcctgggcgacaaagtgagactccatctgaaaaaaaaaaccaacaaaaaacaatagaatacacataattaattaatagagcagtcctagtggcccccatagtgaaattctaatgccttgcagagaacagaatcaaactgtcaacctctgtaggctattctgtattcacagattcatttgtagaagatgcatttcattatacgttgtgtttttagcagttacagtgatggcatgttccttggcaacttcagcttggagagatgagatttgtagcagaaagcactcatctgcatttcttctcttccatctcaaagagcagtgaagaggctgtaaggccgtctggtttctgaggaacttcagctttaccctcaggcaggttccgctgctccatcaggcctatgacactgttaggggccctggaaattgttttaattaattttaaaatcagaagaaaatatgcatataataataatgaatattatgagaatgaatctagaccaaatgatgatcccttacccccgcccttgtccaggtgaatggagaaggccatgcatgtgtcctgagctgagccagtcagagcccctgccccggaccccagatggagaggacagcccgctccaggcagcaggatctggatagtaagcgctggggagctctgggaggccaggaaggtggaggggaggcagccaggggatattccagggtgacagcatggcaggccagggtgaaaggaagtataaaagcccccagacaggaaaatatctgcattcaagcagctaaaggcaggccccggagggtccccggcaagaatggtggaggaggctggagatgagatagaggcagggttggaccacctgggccttataagccagaaggagctgagatttttttttcactccaatgagcagctatgaaagggttttaagggagggagtgaccagatctgatttacattttaaagagattagcactgtggaaagtgtactgtggaggtggggcaagagctgagagccacatggagggccctggatacttctggactctgaatggggggccaggcttcagcgatgtaggtgaggatggagacaggtgggtccaagaggacctgtgggtggaggggctggagggggaaaggaaaggctgttatcaaggataaatggtggtgatggtcgtgctgttctgctcctgagctggggaagaagggaagacatgaagacttctgttcagacccattgaggtacccatggcacacacacatggaagtgtggagaaggcagtggaacatgtcagtctggagtgggggacacaggtcagggctggacgcccctggatgctggaagtgtgggtggcatcagtgcacaactggtgtttgaagccacaaatctctgagttagggaggaaatgggaatgtgctgtgaaccagaaactcagaggaaactgcccttgttgagtccctgctgaagacagagaatgaagacaagatagagaaggattctttctttcttttttttttcttttttgagatggagtttcactcttgttggccaggctggagtgcaatggtgccatctcagcccactgcaacctccacctcccagattcaagtgattctcctacctcagcctcctgaatagctgggattacaggcgcccaccatgcccagttaatttttgcatttttagtggagatggggtttcgccatgttggccaggctggtctctaactcctgacctcaggtgttccgccctcccaaaatgctggcattacaggcgtgagccaccgcgcccagcgagaaggatcctttagatctggtaatgcaagtggctcctgactttgaccagagccctctgggtggagggaggaatctggaagccaaattgggatgggaaggaagagtaaaacagcatgatcaccagtgcctggcctcatctcatccctgcctgggctctggattaaaaaacagctatgagccgggtatagtcccagctactcggaggccgaggcaggaggatggcttgagcccaggacgttgaggctgtgggtgagctacaattgcaccactgcattccagcctgggtgacagagcaagaccctatctctgaaataaaaaatatttatacttaaaaaaatagctatataggacattttgggggcaaatggggaaattggaaaatggactccatattagataatacctttttttgttgagacaaggtctcactctggcatgcaggatggagtgcagggagctcactgcagcctcaacttcctgggctcaggaagtgattctccagcctcagcctcctaaagtgctgggattacaggcgtgagccaccacgcctggcctgtattagataatatatagcagctctgaatttgttgtgtgtgataatggtgtgtggtaagagagaaactgtaggagacacacattgtagtatttagggcagaaagagtagatacttgaaactttccagtgctccaacaataacaaaaaattaaacacataccccatacacagagaaagcacagatggcaaaatgctaattggaaaaatctaggtgaagaatattttaatattttttcaactcctctttcagcttaattatttccttacaaagttgggtgcagccgggtgcagtggctcactcctgtaatcccagcactttgggaggccgaggcgggtggatcacctgaggtcaggagttcaagaccagcctggctgacatggtgaaaccccgtctctactaaaaatacaaaaaattagccgggtgtggtggtgcatgcctgtaatcccagctacgtgggaggctgagccaggagaatcacttgaaacccaggaggcggaggttgcagtgagctgagattgcgccattgcactccagcctgggcaacaagagcaaaactccgtctcaaaaaatttaaataaataaataaataaattagctgggcgtggtggcgggcgcctgcctgtaatcccagctactccggaggctgaggcaggagagtagcttgaacacaggaggcggaggttgcagtgagctagatcttgccattgcactccagactagatgacagactgagaacctgtctccaaaaaaaaactaagttgggtgcggtggcttacgcctgtcatcccagcactttggaaggtcgaggccggcagatcacttgaggtcaagagttcaagaccagcctggccaacatggtgaaaccccatctctactaaaaatacaaaaattagccgggcttgccgggcacggtggctcacgcctgtaatcccagcactttgggaggccgaggtgggcggatcacctgaggtcgggagttcaagaccagcctggccagcatggtgaaaccctgtctctaataaaaatacaaaaattagccgggcgtggtggcaggtgcctgtaatcccagctactcaggaggctgaggcaggagaatagcttgaacccaggaggtggaggttgcggcgagccaggatcacaccattgcactccagcctcggcaacagagcgagaatctgtctcaaaaaaaaaaaaaaaaaaaaaaaaagaggccaggcgcggtggctcacgcctgtaatcccagcagtttgagaggccgaggcaggcagatcatgaggtcaggagattgagaccatcctaacacagtgaaaccccgtctctactaaaaatacaaaaaattagctgggcatggtggtgggcgcctgtagtcccagctactcgggaggctgaggcaggagaatggtgtgaacccgggaggcagagcgtgtagtgaaccaagatcgggccactgcactccagcctgggcgacagtgagactccgcctcaaaaaaaattttttttaaattttaattacaaaaaggaagggtgactagcagggtcaagagaaagtttcatacaattgagaaattttttgaagaatgggagcataaatgtgtgttgaaagcaatgctcatggaagggaggaggagaaggtgattatgtcagccaggggtgagaggtgcagggcagaatcctggaggagcaggtggatggcccagagtgagggcctggagggtggcctttgcccagtgtggggcagccacacgtcagatgggcaacttggtggggggctttcctgtctgatgacttcccctctgtactctacgtaggatatggggctctctgctaagaagggccaggagagcaatggggaggttcccgcagggaaaaactggtgggatttgtgggtttgtgttgacgatctgggtgaagattgtttattggtttagggagggagacaagaggaaagattaagtccccacacctccaagactcagtttctccatctgtaacatgaggagattgaactaggagatctcaaaggactctgaactccagtacgctcatggtccctttaggaagtgatgggaagcatatactgaatagcacgagcctgggttatttaagaattaaggatagtggctgctctgcctatggagtaaccattcctttttttttttttttttttgagacggagttttgctcttgtcacccaggctggagtgcaatagcgcgatctcggcttactgcaacctccgcctcccaggttcaagcgattctctgcctcagcctcccatgtagctgggattacaggcatgcgccactaccacgtctggctaatttttgtatttttagcagagacgaggtttcaccatcttggccaggcttgtcttgaactcctaacctagtgatccacccgccttggcctcccaaagtgctgggattaccggcgtgagccactgcacctggcagagtagccattcttttattcctttacttacttaataaacttcatttcacttaaaaaaaaaaaaagaattaaagatagctagtaaaaactagacaattgcctaagacgtttctaattgaggattaaaaccaataaatacaagaaggccaggcatggtggctcatgcctgtaatcccagcacttggggaggttgaggtgggcagatcacctgaggtcaggagttcgagaccagcatgaccaatatggcgaaaccctgtatctaataaaaatacaaaaattagccgggtgtggtggcgtgtgcctgtagtcccagctactcaggaggccaaggcaggagaattgcttgaacctgggaggcagagactgcagtgagccaagattgtgccactgcactccagcatcctgagcgacagactgagactctgtctccaaaaaaaaaaacaaaaaaaccaataaatacaaagaggcacgtgaaaggcagactgctggccaggcatggtggctcacgcctataatcccagcactttgggaggccgaggcaggcacatcatgaggttaggagagtgagaccatccggctaacacggtgaaactccgtctttactaaaaatacaaaaaattaggtgggcgtggtggtgggcacctgtagtctcagctactcagagggctgaggcaggagaatcgcctgaacccgggaggtggaggttgcagtgagcccagatctcgccactgcactccagtctgggtgacagagcgagaatccttctcaaaaaaaaaaaaaaaaaaagagaaagaaaaaagaaaaaaaaagagaggcgggtgtggtggctcacacctgtaatcccagcactttgggaggctgaggcaggtggatcacctgaggtcgggagttggagaccagcctgaccaacatggagaaaccccatctctactaaaactacaaaattagccaggcgtgtaatccctggcgcatgcttgtaatcccagctactcgggaggctgaggcaggagaatcgcttgaacccgggaggcagaggttgtggtgagccaagatcacaccactgcactccagcctgggcaacaagagcgagactctgttaaaaaaaaaaaaagaaagaaagaaagaaaagaaaaagaaaagcagactgtttaaggcttcagagcacccctgggggagtgaggaggtggcccagaggccgagggctctgagatgcatgacgaggtgctgtttgggtgaacacggtgcggggtccttttcagagtatatactgctttctccttgctctggccgaagttcacatcacacagcatgaagtgaaacagcacatcaatgtgatgaacacggttaacactgaagaaacctgtatgtgcgagcaaatatagcatgaaagggttcagggaattttttttttttttttttttgagactgagtctcactctgttgcccaggctggagtgcagtggcacgatctccgctcactgcaacctcccacctcccaggttcaagcgatttttctgcctcagcctcccaagtagctgggactattggcacgtgccatgatgcctggctaatttttgtatttttaatagagtcggggtttcaccatattggccaggctggtctcaaactcctgacctcatgatctgcccaccttggcctcccaaagtgctgggattacaggcatgagccactgtgcccggccgtcctgttttttggtgtgtgtgtgtgtgtgtgtgtgtgtgtgtgtgtgtgtgtgcacgtttgagagggagtctcccactgttgtccatgctggagtacagcagtgtgatctcggctcactgcaacttctgcctcccaggttcaagcaattctcctgcctcagcctcctgagtagctgggattataggcatgtgccaccacgcctggctaattttttgtattattagtagagacagggtttcaccctgttggccaggctggtcttgaactccaggcctcaagtgatccacctgcctcagcctcccaaagtcctggtattacaggcatgagccaatagtgcctggccaatagtttttttttatttttatttttaaagggacagggtctccctctttcacccaggccgtaaccctgaactgcgaggctcaaacgatccttctgccttagcctcccaactcccaagtagctaggactacaggtgcacaccaccatgcctggctaatttttaaattttcggtagagacgggatcttggtatgttgcccaggctggtctcaaacttctggcctcaagtgatccttctgcctcagcctcccaaagtgctgggattacaagcgttgtgccacagtgctcggccaacaatagatttataatatcactgagggcagggattgtgagtcatcaccagctccccagtgactggcagcatgccaggaatgggggaggggagagagggaaggaagggaagcttctcggcctgacagttcagccaggtgcaggcactgtcatgttcatggccaccaggcatctgccaagcaccaggctctgtgctgcccactttacacagatggtctcatttggccttgatgacagcctgtggaggttggtattatttactccaagaggaaactaaaggcagagagtttaagtaacttgccaaaagtcacatggcagaatcaggatttgagctcagatatgttaaactgaagcttgtgctcttgactgcctggctgtgcagtcttccagaagagcacggcatggacttctggaattcttgcagccactcgactcaaaagcagttagcatagtgctgagcacaggtaatagggcatttgacaaatgccagtgactgtagaccgaatgattgacagtctgaaagaatgaatgagtgaagtgacttcctgtcttgtgaggtttttctcttcaaatggaagatttccccatagcctttgaatgctcaatctaattaaggcaaaaaggcatcagagaattgcagggcctttcctttattaactgtcaagtccaatctggaggctgtttatgtgccaaggtcagagatcagtctttagctgctctcctctcattcatctggccaacctcagaacataaagtttattgatgcaaaactgattggcaggctgggctaacgagctggcgggaacagggagtatcagaaagagttctaagccagcgtcggctcggcccggctcctctgctgtcctaacttccctgtgctctaggttgcagggtcgcacctttcagaagtgaaccccagaagagtagcaaatactgcctggccttttggcagttcttatggagcccagtcaagagcaggagggggagcagtcctttttcctggttttgtctattaacgtggaaagagcgaggcatggaagattaggtagtatagtctttttttttttttttttttttttttttttagacagagtcttactctgtcgcctaggctggagtgcagagtgcagtggtgtgatttcggctcactgcaagttctgcctcctgggttcgtgccattctcctgcctcagcctcccaagtagctgggactacaggcgcccccccaccatgtccggctaattttttgtgtttttagtagagacggggtttcaccgtgttagccaggatggtcttgatctcctgacctcgtgatccgcctgcctcagcctcccaaagtgctgggattacaggcgtgagccaccgcgcccagcagtatagtcttaagacttcacaaatcaaagaaattcctgtgtaagcctcgtcaggcctaggggtcgtgaagaggaaggtaactgttatgcctacagtttgcagccaacccattagtaagcagcgcctgtctgtggggagctcctggcagtgcctcctcctccatgcccagcaggaaagagaggctgggaaggatgcatgggccacatgcctggctctacttgcagtgcccccaggataaaagccaggaggctggccgggcacggtggctcatgcctgtaatcccagcactttgggaggccaaggtgggtggatcacgaggtcgggagatcgagagcatcctggctaacacggtgaaaccccgtctctactaaaaataaaaaaaattagctgggcgaggtggcacgcgtctgtaatcccagctccttgctaggctgaagcaggagaatctcttgaatccaggaggcccaggttgcagtgagctgagatcgcaccactgcactccagcctaggcgacggagcaagaccccgtctcaaaaaaaaaaaaaaagccaggaggtgggcagtcaggagagacaggtggacctgggagctgtgtcttctactcaagatagggaaagtacaactcccctggttattatcaggaccaattgattttgcctgatctgagagaaaacatcctgaccacaggtcacttgaaatgccctgtaattcagaaacagtggctgtccacagcagacagctatctggatttaagaccccaaattcacacaccacaccacaaattgtccacttacaagcaaaaaaataacaaacagccaagcccccaacccactctcattttattcccttggttccaggtctcctctgagcaggtcatgtctcctggtgtgtttgcgtacaggctgtggggctggggggaaggagtcctttttcctcttaccccaggcagggctggctccaggttgcagagctccacagagaaaactgctcactgcagagaagggcatagtccagcccaagctctactctgatgagctctgagatcgggggtggtgacttcatcttctatctatggcttggaacaatgatgatgaccatgaccctctggtttcagttcagtcaatgaatggggagcaaattgctattgtcaggcactaggctagggaggtgattcagaaaggctcccagagacccacacaccaatcactaaactaatataacacgctaaatactacatctacagtagggataaagtgttttaggtacacaaagggagttgagaaaagcttcagaggttttcaaagtggtttccagaccatcatcaaccagcctcacctggaaagttgttagacatacaaatatcagccccaccccagactggctgaataaaaaattctgggggtggggcccagcaatctgcgtttgaacaagccctccaggtgattatgatgcaacctaaagtctgagaatcacgtagaggttggaaaactaccttgcaaccagcaacctgtttttgcaaataaagttttattggaacacagccataatccatcattcagacattgtttgtggctacttcccttttaaccagcagagttggtagttacgacagagacaatatggcccgcaaagcctgattctgccaaatgactagactagatttcccatactagggagcatagcctagattttttttcttttcttttttttgagacagaatctcactgacacgcaggctggagtacaatggtgggttctcagctcactgcaacctccaccttctgggctcaagtgatctcccaacctcagcttgccgagtagctgggaccacgagcatatggcaacatgcgcatctaacttttgtatttttttttgttaattattattttttgagaccgagtctcgctctgtcgcccaggctggagtgcagtggcgggatcttggctcactgcaagctctgcctcctgggttcatgccattctcctgcctcagcctccccagcagctgggactacagacacacgctgccttgcccggctaattttttgtatttttagtagagacggggtttcactgtgttagccaggatgctctccatctcctgacctcgtgattcacccgcttcaccctcccaaagtgctgggattacaagcatgagccaccgcgcccggccctgtatttttttttaatgacataattttatttatttatttacttttatttgagagggcgtctagctctgttgcctgggctggagtgcagtggtgcggtctcggcttactgcaagctccacctcctgggttcatgccattctcctgcctcagcctcccaagtagccgggactacaggtgccagccaccacacccggctaattttttttttatttttagtagagactgggtttcaccttagccaggatggtctcgatctcctgacctcgtgatctgcccgcctcggcctaccaaagtgctggtattacaggtgttgagccaccgcgcccggcctagaagacggaagtttgcatgttgcccaggctggtctccaactcctggggtcaagtgatccactgcctcggcctcccaatgtgctgggattacaggcgtgagccactacacctggcctcttttttttttttttttaagagacaaggtttcaatatattgcccaagctagactcaaactcctggcctcaagcaaccctcctgcctcagcctcctaagaggctggaactacagacaggtgcacgccactatgcttggctcctgtctatggcggaggttgcagtgagcagagattgtgccattgcactccatcctgggcgatagagccaaactttgtctcaaacaacaacaaaatccccttagagctctttcctagcaaccaaacgtttttccattttgttaggaattggaagaagagaggaaataactggctaagtaactactctatatcaagcacggttacaaggcattttccaacattatttcaattttaatgaaagctgctcatgaaattaggtttactgggtcacagttttcagatgaggaacctgggacaggtgaagggacagaattggaacccagttctgtcataccacagatgccccacctgttctacactggcctgtcaagaataacaataataataattattattttagagagaggcctgctgtgttggccaggtggactgcagtggcacgacctcggctcactgcaaccttcgactcccaggttcaagcgattctcctgcctcagtctcccgactagctgggattacaggtgcccaccaccacgctcagctaatttaaaaaatatttttagcagagatggggtttcaccatgttggccaggctggatctcaatctcctgacctcgtgatccacccgccttggcctcccaaagtgctaggattacaggtgtgagccaccgcgccaggcccaatgattattttaaataataattattttttttgagacggagtctcgctctgtcacccaggctggagtgcagtggtgtgatctcggctcactgcaacctccgcctcctgggttcaagcgattctcctgccttagcctcccgagtagctgggactacaggcgcccgccaccacgcctggctaatttttttgtatttttagtagagacagggtttcaccgtgttaagacaggatggtctcgacctcctgacctcatgatccaccgcctcggcctcccaaaatgctgtgattacaggcgtgagccaccgctcccagccttaaataattacttttattttattatcattatttttgagacagggtctcactctgtcacccagaatggagtgcagtggtgccatcttggctcactgcaacctccgcctcctgggttcaagcaaaattctcctgtctcaacctcccaagtagctgaaagtacaggtacgtaccactatgccgagctaatttttgtatttttagtagacacggggtttcaccatgttggccaggctggtctcgaactgctggcctcaagtgatccacccgccttagcctcccagagtgctgggattacaggcgtgagctaccgcacccagcctactttgaaaaatgggatcatcggccaggcgcggtggctcatgcctgtaatcacagcactttgggaggccgaggtgggcggatcacgaggtcaggagttcgagaccagtctggccaacatagtgaaactccgtctctactaaaaacacaaaaaataagccaggtgtggtggtgtgcgcctgtaatcccagctagttgggaggctgaggcgggagaatcgcatgaacccaggagaaagaggttgcagcaagctgagattgtgccactgcacttcagcccgggcgacagtgtgagactctgtcaccaaaataaaataaaataaaataaaataaaaagatcctctagcccaaatccctccatcacagaagcagttggagaagtttgaaaaggttagatgataggcccatgtggcttgtctgtggaaagagctaggctgcaagacacctctgactccattgagtgctttctcttactctcctttcccgatttaagacattaaatcatttaagacagtgtcatttggtcgagtgcggtggctaacgcttgaaatcccagcactttgggaggctgagatgggcggatcaactgaggtcaggaattcgagaccaacgtggccaacatggcaaaacctcgattctaccaaaaaagaaaaaaaaaaaaaattagccgggcctggtagcgcgtgcctgtaatcccggctactcaggaggctgaggcagggagaactgcttgaacccgggtggcagaggttgcagtgagccaagatcgcaccactgcactccagcctgggcgacagagcgagactctgtctcaaaaaaaaaaaattttttttaaaaagacagtgtcatttgatggagttgctttcttgatcgttggctgcaattaaagacctagcctcactgtcttttgtgttgccttggaccggctcttaggttctaccgccctaacaggcagtggaggctggcctcgagtggtagtcctccatcttgccctcttttcctaccctctacccccaacccgcgagctgctctcctgtcttcttccaacactgttctctttgggaatatgcatgtccaacttcccaagcagtctgggatctggagtaagatgactcttggtttaatgaagtttttccacagtgcttgcatgtgccccaagggtttggaaggttggagaactaacaaaaagcaaagagccatcctgtgtcgtttcggcaggtctgtgttctgttaaaatatggaagaattaagagaagaacgaagaaataagggcagaaactccactggggagtacttgtctaaccctgaaaaagttcaaggctgttgttcaaggtctgaatttttcccttgagatttgcttgtagtccttaaagtcatcttcagacatctgatcaaggcagcatccgcggaaaattataaggtgggtggctgcactggagcctgtcctggctcaggggcgccggtgaagagtgatttttttcccttggccttgggggatcagagggggtgccctctgctatgcaggaagccctccttgcccgctagatagttctcattcctcaggagatactctgtgaggggccggcgtgttttctccatcttggcacttaccctcagaccctcctaagtacccgggagggccgtgtttttcatcggaggttgaaatggaacctccccctgggtgcccggggagagtaccttgggggcagcgcccctccttccggagggcagcatccccgcgggggcgggggctcggctttgatcccagggcaccttttgtccctggagacgctctgccagccaggtacgtggagggagtgcagcccgccctcccgggcgacgcgcggggctggggcgggccggcggctccggggagtggcggccgggagcccgcgaacgcgggtgggcgccgtcgcctcactaaccgggcgcctccgggaagtccgggcggggtccgccgctcacacataggattagcgtcctctaaactccatccctgggaaaagccgccgcacttctcacccaaactcgcggagccgaggggctgggcaggggttgggcgggcgcgggggccggcgaggcggatccgggaacgggtggacccgggcggccaagccccttcagcgccggcccaaccgccccggcccgggccagtccagcggggcgggggccggcgacacaaaggcggcggcgggtcctccgggcctccggcctcgggcagtcgcagggcgccccgggccgccggacctcccctcgcgttgcggcccgtcagccggcgccgcccgtcgcccgccctcagccgtccggcgaggcgcggcttcctccgccggcgcggggtcccctggttaacccctgcccggcagcgcggccgctgattggagaaggcggggcgccggggcagcggggacccccccccaccttcctcgtcccctccccctgctcccccactgtcggcgcttcccccacccccccaggaccccccccgcctcccagccgtgcaaatctcgcgaggaaacacgcggtttcactagtgtgtttacaccgatcactactaatccggaccgaaccgatccggattaaggggccggaggcgggtcctgggcaccagcggttccgacccccccgccctccgcgccgcacccgagtggcccccagccgagcgggcccccacctcctggcccggcctgggccctcctgcgcctcccttggcctttgtccggcgccaggaggccggtcccgcgccccccgcggccgcccgggcccgggcccgcgtcgggcgcctggctctgtacgcgagcccggggatctgcggccttcgtgccccccctcccccgcccgccctctcgtggagcccggcgccggcggcggctgcccgggcggggggttgcggcgctcaggagaggccccggctccgccccgggcctgcccagggggagagcggagcggtccgcagccgggtcgggtcggggcccctcccgggaggagcgtggagcggcggcggcggcggcggcaggtgagaggctgagccccgggcgggggaggactccaggcctggggcattaaccgtcctggggacccctttggcctgaggagcctgcgacctgggcccagctcggggccggctccggaccgcagctcctgggcgctgaggcgggaggggctccctgagggctgcgggtcgctgaggggccgggcagaagatgggggaggcccaggcggccccggcctgggattggggccggcggccggaggagagacgggggcccccaggcagctggaggcctcggcagcctcccgggcgcccccgagagccggccctcccttcctccgtgacaggtgggcctggagttggggaaagtttggagccggcgaggggcgccgggaccaggccccatcgctcctgcttcccggctgtgggctgcagggaggatcccagtccaaggccccgctggaattagacggagtggctatttccttaacatgagttgacattaaacggaataaccgccggggcgtcattttccgggccgggcctggggatggaggtttgggaagtgttgcgagagaccttggggtttgggagagactgcaacctttgccattccgacctcgattagggcagggcaagacgcgaggaaggccacgggggaaactcattctcccagtctcttttttttccttctttttctttttgtaaagatgcatttcaacctttctgagaatttcctaattctctctctaacctgcacttgcatgtgtgggtgaaactttaatttgtcaccttttcattcccctttgccccaggctctcaatccaggaagggaaatgaaactgaaggacttgtaagggggttgttactggagattgtagagttgttggattgcagaggagaatgttcgattcatcttttcagtaactttaaaatcacaccaaccattccaactacttaataatgtgttcgaaggggttctatgtaatatgtttcttttccactgttaatattaaagagaggttttaaatgggtcgtgtaggagttggtctcttgcaaaggatgaacatatttgctgaaagtagcctgtgcattaattggttatggaagtttaaaaatggtgtcctcctgcccctccctgcttggaagaagggctaaaagcagatgtccagaatcaagagaaaactactgcagggagtggtcagaaaaagattttttaaagggattgttatggagctatattaatttactgagtgaatggaggtggatggttttaccgtgggctctctattaaatttaaaataattccttttctcatgagctactgtgagctcttcagagacaggagctgtataatagtgattttgcagttatttgtagcttctgattcatcctatattcttttgaaattattgtcaatgattcatatttttagtttaaggactacttcctgagtgggaaataaatatctgaagatacttagctagattaaggctgatagaaggaattttctttttgcaggctagttcttgttttgttctttcccctgtgctcaacttttacagaaattatatgaagggtttgaggggtttatttttgctgttaaaatcaaatcagaactagggaagaaaaagtggctgtcatagaagaggacttctgagctgctttaaaacttttcaatatattactgtttgatgcagcacatagtagtctaccacttgtatgctatatttacttgagatttacctgcatttgatctttcagtgaaataattactgtgagttttgttctacagaaaattgcctcctcacattttagtgtttatggtttcacagcctactttttctttttcagcagaaatgatggaagaattgcatagcctggacccacgacggcaggaattattggaggccaggtttactggagtaggtgttagtaaggtgagtaaaatgatgatcatgaacactattcatattctaatttaaacacattttttaaatgattaagagcaatttgggtaggcccttctgatagtttgcaggggagaagatttgggtcttaatttcagtgaacttttagatcctactggtcattccagtagtcatttaacatagtaggtttgaaaatgttctatatgggaatatatgtttcttcttcctttctggtataggagaggtttctcatggttcttgttacaaggaaactaacaggatgtgtgtatagattctatgccatattttgttaaaacttgtcagccattcagaaagaaaattacaaggcattgcatagctttgttacattggactttggaggtagttacatggtagagtattgaaaaattggcctctgtgaagtctgcagactctttactggttgcacccccagactggtttgttgctcttctcattcttccttcttagtttttatttttgttgcaggagcataatattagattaggcccccattaacgggcacgtatgaagttaagcaatgttatagtttcctatgcatgtttatgtacccactggtccacccctctgctctcataggatgattttacaatgtgtaaaatgtttgattttaatacagtatgcaaagtatatttacgatattttatttaaaagctttattggtccaagatcatattacttgggcttgagatgtgtgaacgtatgagctactgaatttttttttttgagacagagttttcctcttgtcgccgaggctggagtgcaatggcgtgatctcggctcactgcagcctccacctcctgggttcaggtgatgattctcctgcctcagcctcctgagtagctgggattacaggtgcccgccaccacgcccagctgatttttgtatttttagtagagatggggtttcaccatgttggccaggctggtctcgaactcctgacctcaggtgatccacctgcctcagcctcccaaagtgctgggatcacaggcaggagccactgtgcctggctgagcttttgatctttaaccagtgtgatacaacatttgtttctgtgcttttcaagaaatcctgtctcatggtaacctgggtgttgatctcgtgctttagttagtagcttctccaaggagaaggcgtgttgaggtttagttggaaaaatgggcttctttgatgggtctcacagttttggtgagccgggatagcttgatagggttttgttttttttttttttgagtcagagccttgctctgtcacccaggctggagtgcagtggcacaatctgggctcactgcaacctctgcctcctgggttcaagcgattctcttgcctcagcatcctgagtagctgggattacaggcatgcaccaccatgcctggttaattttttttatttttagtagagacagggtttctccatgttggccaggctgggtctcgaactcctgacctccagtgatctgcctgtcttggtgttccaaagtgctaggattacaggcatgagccaccacgcccaaccagcttgatagtttttgtttattcaacaaatattgagcacctgctgtatgctaggcattgtgcaaggtgttagggctgatgcttgagcacagtacctccacatctgcagtatggggagagagagatgataccgtgatgagatctgtattagagctgtgacaaggtgctgtgggaacacaggatttgttacatattcttaatttctttggccacttaaacagtttacttttgtggcactttagagtggctgtgcccctggacgttgtatactgaagttacatttacaaatgtaaactctctgatctaggtgaagtagcttcaaatagaagtgagcaatatatttgaatactaaattgatctctaaatgacctctgatgtgtctttttaacttgaagattgagcataaggctaatgtccagatctgtctgtttaaatggtccccccacccccgcctcccgtaagtcagtaagtttgtattcaaattttacatagttaagctcactgatctttggattagggttgttgttctgtttttaggttcgtgatggctgtattcaagtatacttttgatggagtagggcataagtgataagaatgagtgacattcaacatgttgctgtctagacccaacttaaagtcatgtaactaaggtatcagaaaactttaatacagtaacctatctgtttaataggaaattctacctttaacatagaaagaagttctctgtacagaaaaagaaatttacctatttccagtttttttgtttgtttttgagagggtctcactctctagcctaggctggagtgcagtggcacgatctcggctcacctcaacctccatctcccagtctcaagcaattctcctgcctcagcctatagatagctgggattacaggcgtgcgccactaccaccctgttaatttttgtatttttagtagagatggggttttaccatgttggacaggttggtcttgaactcctgacctcaaatgatccacctgcctctgcctcccagagtgttgggattacaggcatgagccactgcacccagctttatttccagttgtttttattccattagttgttttttttttgagacagagttttgctctgtcaaccaggctggagtgcagtagcacaatctcggcgcactgcaatctctgcctcccgggttcaagctattctcctgcctcagcctcctgagtagctgggactataggcacctgctaccatgcccagctaatttttgtatttttagtagatggggtttcaccatattggccaggctgatctcgaactcccgaccttgtgatgtgcctgcctcggcctcccaaagtgctgggattataggtgtgagccactgtgcccagcttaagtagtcgtatgttactttgatatttccagtcacggtaagtatattgattacaatgaatttgttatttgaggactagcaggagagtattttttttttccataacaaagaaacttgaagaaaaaaattaattctgtagtttgcagagccgggaaaagaaaatctccatttcgtatgacttcttttttttttgagacagagattcactcttgttgcccaggctggagtgcagtggcgcgatctcagctcactgcaacctccgcttcctgggttcaagcaattctcgtgcctcagcctcccgagtagctgggattacaggcacgtgccaccatacccggctaattttttgtatttttagtagagatggagtttcaccgtgttggccaggctggtctcgaaatcctgacctcaggtgatccacccgcctcagcctcccgaagtgctgggattataggtgtgagccatcgcgcccagcctttgtattacttcttttaccagtaagacatcgtacctctcagactattgatttgaaatgggggtgtggaggggatgatgatactgggagaaaagggtgcttttggaaaaactcctctccctggctttgaattctcattttggatcattatttcccaataagaatatcactgtgttagggccaggcacggtggctcacgcctgtaatcccagcactttgggaggctaaagcaggcagatcacgaggtcaggagatcgagaccatcctggctaacacggtgaaaccccatctctattaaaaaatacaaaaaattagctgagcttggtggtgggtgcctgtaatcccagctacctgggaggctgaggcaggagaatggctgagcccgggaggcggggcttgcagtgagcctgggcgacagagcaaggctccgtctcaaaaaacaaaacaaaacaaaaaaagaatatcactgtgttgatgacagctttgtttttcaaagatcaaaaaagatttcagcccctgcagctccaaataagagagcagagtgacttccctgtgatggtgccatctagtgggactggttcagcctcttgggctgtctcttgaatttctcctaactattcataacatttttcagtactttttgatgtccatagaaggaagaaagtcagtgccactgtggattctttcctagtggacaagagtgttacaagtagctacagcctttgaactttctggttgttgtaaatcttctgttgtataactttcgagttttttccacctgcaaattagatatacactccattacttagactaaaacaaaatggccaaatctccacatctattacttatatttaagttgctcattacctatatttaggtttttaattttttatttctaattttcttgcatagtgcaaatttttaattttcttgcatagtgtgtttataggtaggtactcagtttctcagcatatttacttcataataatggtaaaacaaaagtcatttattttgggctttgggatgcactatttggtttttgtttaaaagattgacgttttctgtcatgaactgatgaggggaaagtagtaatgtgcacccaaaagtctatagcaggctctctagtctagctgcccctttttaggaggacctggagccatcgtcttagcagttttgaggtgataaggttaaactgggttgtgaacctagtaattttctggttttttttttttttttttttttgagacggaatctcactctgtcgcccaggctggagtgcagtgatgcaatctctactcactgcaagctccgcctcccaggttcacgccattctcctgcctcagcctcccgagtagctgggactgcaggtgcctgccaccacgcacagctaattttttgtatttttagtagagacggggtttcaccgtgttagccaggatggtctcgatctcctgacctcgtgatctgcccaccttggcctcccaaagtgctgggattacaggtatgggccactgcacccggctgctagttctttatgtcttgttgacttgacatgtgagctgtcctacctctttttttgagacggggtctcactctgtcacctgggctagagtgcagtggcgcgatctcggctcgctgcagcctctgcctcccaggttcaagcgattctcttgcctcagcctccccaagtagctaggactacaggcgtgtgccactattctcagctaatttttatatttttagtagagatggggttttgccatgttagttggccaggatggtctctctctcttgacctcatgatccgcccgcctcggcctcccaaattgctgtgatgacaggcgtgagccaccgcgcctggcctgtcctacctctttttaaagacctcttcctgtaagcactggatgatctacttctagtaatgtgaaactgactatatcttgaattcatatgttttcaatcaacctgttgcagtttatatttcacaccctgctcccttttgacagtttaagtacagatagtctcagcagttctggagaccatgtaaagtaggcagaatttcacccttgcatgcattgttacttgtacctagttggatatcaatgctaatacagtagcaaatacttataatactgtgtgccaggtactgttccaacagtacaacaaaagcaataagaaatgaatttagatcttttataacagggataatggttaacaaatctgtacataatcaactcactggattaataggcattctccattctctctttataagccatactgactgatgcttatcacattgctcccaccagttgaattatagccatgtcaatgatcattttacaataacttacacttgtgttgtaattattctatttaatacacaattgcataatgcaatgaaatatgattgcaggctgggcgcagtggcttacgcctgtaatcccagcactttgggaggccgaggcaggcagatcacgaggtcaggagatcgagaccgtcctggccaacatgccaaaacccgtctctactaaaaatacaaaaaataagccgggcgtggtggcatgtgcctgtaatcccagctactcaggaggctaaggcgggagaatcacttgaaccagggagtcggaggttgcagttagccgagatcatgccactgcactccagcctgggcgacagagcgagactctgtctcaaaaaaaaaaaaaaagaaagaaatatgattgcaaaatgaaagaattgtttccaagagaactaagttaaccgccctagaaagactagataagtcagcacgcgcctgtagtcccagctgctcaggaggctgaggcaggagaattgcttgaacgtgggaggcagaggttgcagtgagctgagatcgcgccattgcgctccagcatggccaacagagtgcgcctccgtctcaaaaaaaaaaaaaaaaagtaagtcagcaaggagatatctgtaaaaatttatgatattcttttaatctgcaggaattctttacttaaatccttggcaagtatcttttttttttttttttttttgagacggagtttcactcttgttgcccaggctggagtgcaatggcatgatctcggctcaccgcaacatccgcctcccaggtccaagtgattctcctgcctcagcctcccaaatagctgggattacaggcatgcgccaacacgcccggctaattttgtatttttattagaggtggggtttcttcatgttggtcaggttgttcttgaacttccgacctcaagtgatctgcctacctcggcctcccaaagtgctgggattacaggtgtgagccagtgcgcccggcggcaagtatcttttaagttctcacttttttttttggagacggagtttcactcttgtcgcccaggctggagtgcagtggcatgatctctgctcacagcaatctccacctcccgggttcaagcgattctgctgcctcagcctcccgagtggctgggaggtgcccgccaccatgcccacctaatttttgtatttttaatagagacgaggttttaccatgttggccaggctggtctcgaactcctgacctctggagttcacccgccttggcctcccaaagtgctgggattacaggcgtcagccaccgtgcccgggccaaggaactctttttctatcttttataaatttttaagtctgatacatcacattatataatcaaattgacttctgaaaaggtatttaaccaactgatacctttcttttcatgtagttcattgcagcaattagaagctttcagttatgaatatctagtgtcagctttttcacataccaaagtcactttcattttttaaaaatgtttgtatgtcttacatttaattacatgcctgacaattctcaacaagtatgaatgctgagaaatggcctatacttatattgatgcattttaaggaactgtggattaatttactttagtatttatttgatttcctccttatttcacatgtagtcaagtaccaacacgtgcctctttctctgaaatttctgaagtgtttttctgcccccattgctactgccttaatccagactgtttttattcataacttgaaattctagtttggaagtcttgcactctttctgttcttttattggttaccacagaaattacaacagatatttttaacttatcaaaggttaatgttaatacctttgtcttcctcttggtcagtacgagggccttgaagatttttttttttttttttttttttgagatggggtgtcactctgtcacccaggctggagtgaagtggcatgatcatggctcactgcagccttgacctcctgggctcaagtgctcctcccgcctcagcctcctgagtagctgggcctacaggcacacaccaccacacttgaataatttttgtagtttttctttttataaatttagaaaaaaaatgcctcccatcagcatcttgcaaatttttgtattttttgtagaaacagttttgccatgttgcccagactggtgaccttgaagatttaactccatttattcccctcacaattcacacgccattgctgttctgtatttaattgtacgtgtgtgtgtgtgtgtgtgtgtgtgtaaatttttttttttttttgagacatggtctcactgtgtcacccaggcttgagtgcagtggtgcgatttcagctcactgaaacctctgccttctgggctcaagtgattcttctgcctcaacctcctgagtatctgggactaaaggcacgtgccaccatgcccggctaatttttctttttttgtatttttagtagagatggggtttcatcatgttggccaggctgatctcgaactcctaacctcaggcgatccgccagccttggcctcccaaagtgctgggattacaggtgtgagctactgtgcccagtctgtatgttttctagagctcttttaggtttatagaaaattgagcagctaatgcagagttcctatatacttcctcaccctattttctcattattcacattttgcattattacaggtgtgagctaccatgcccagcctgtatattttctagagcacttttaggtttatagaaaattgagctgctaataacagagttcccatatacttccttaccctagtttctcattattcacattttgcattattagtgtctttgttacaattgatgatacgttattaactaaagtccattgttcacagttgtctactggcttccattgggctctttatttttatttttatttttttgagatggagtcaacttgcccaggctggagtgtggtggtgcgatctcatctcactgcaacctctgccttcaggttcaagcaattctccctgtgtcagcctcctgagtagctggaattacaggcgcccaccaccacgcctggctaatttttgtatttttagtagagattggtttcaccatgttggccaggctggtcttgaactcctgacctcaagtgatccacctgccttggcctccgaaagtgttgggattacaggcatgggccatcacacccaaccagttatagaatattctcagccgttatcttgtcatatattgcttctgtcttattctgtcttctctggcatgctaaacatatactagaccttctcattgtgttttctctgcctcttaccctgtctcttgtattgcttgtctttttgttttcttatctaaatacttggtagtttcttgtgacctatcttccacttgattaattttctctttagatttgcctaatctacataaacctatacgttgaaattttataagagctgagtcactcttatcctgagggtgtagcccatgggtcttctaatgtatggggtggctttcccacactcccctcattgggcagggtctgggctttgactttcttctctctctatactcccaggcctcttaaattatagcttaatttcatagatttttctttttctttttcttttttgagatggagtcttgctctgttgccaggctggagtgcaatggcatgatctcggctcactgcaacctccacctcccgggttcaagcgattctcctgcctcagcctcccaagtagctgggactataggcacgcgccaccgcacgcagctaatttttgtatttttagtatagacaggatttcaccatgttggccgggctggtctcgaactcctgacctcaggtgatccaccttcctcggcctcccaaaatgctgggattacaggcatgagccaccatgcctggcctaatttcaaaaatttttctttagaatttaatctgcaaatgacttcaaattgaaatcattttttatttttaaattttaacttttagcgacaggacttcatccccaggctggcctcaaactcctgggctcaagtgattctcccacctcagcctcctaagtagctaagacaacaggcatgtgccattgcacccagcagaagtgatttttttgagttctggtcttgtgtctctggattcttgacttcttacagaagtaattctttatttcattgctttgcagtcaataatataaaactaacacttagtgtgtgtgaactcttgtgtcactataaagtttacctccttgtgactttcacttctcatctgcttccttcttccttcctgcctataagtggttggcattggcgttgtcatcactcttggcctttaaagtcatttatttcctattctctgtttacttttagttaaattcagattaaatggaaagatttcttaaaattttatttttaagaaaggccatgagagggaaaacaaataaggtatattatcagtggtttcttatttcatacctgggtctagggataatttgacttagttctattcttcctctctaccttgtctgggtcttaaattgttaggttcctcctggtggtatgtttcacttgatcctggctactactagatgtgatgggattagtttggaatctacttcctaatatgttggccatggttagctaagtacttcatatatttatttatttatttttgagacagtcttgctctgtccccaggctcctcgagtgcagtagcgtgatctcggctcactgcaagctccgcttcctgggttcaagcaattctgcctcagcctccctagtagttgggactataggtgggtgccaccatgccctgctaatttttgtatttttagtagagatggggtttcaccgtgttggccaggatggtctcgatctcctgacctcatgatccacccgtcttggcctcccaaagcactgggattacaggcgtgagccctcacacccggcccccatatcttactcttaacatatcctttttctaaaaaactgcatatattgcaaagtattggagtaggaataatataactttgatactagaatctgctaagaagttagctagctctagttaacttaggagtcatttcaattctctgggcacttccaatttaagaattttatgtttgatgaactacacaaaaagaggaagccagatttgagatacaggataataaattccaaaaattccagttaagtattaatagtgtgaaagaatgagtggtggtattaaaatataaaccttcaggaacaaaggttctataggataaaatctgccaaaattatttccttcattttgtatatatatagccttttgggaacatgggttgcatacaataaaataacgatattagaaaaataccataggagcaagaaaagtaccttgttttgcccattaaatatactccgaagacagcagtgaggaaaataaaggtgaaacatttttctaaaaatagtctcagaataaggatggtgtctgttttctagtcctaactagatgagggagatagagatttgttattaaactgtttttttttttgttttttgagactcagtcttactctgtcgcccaggctggagtgcagtggcacgatcttggctcactgtgatctccgcctcccaggttcaagcgattctcctgcctcagcttcccgagtagctgggattacagggacctgccacctcgccgggctaatttttgtactttagtagagatggggtttcaccatgttggccaggctgttcttgaactcctgacctctcaggtgatccacccaccttggcctcccaaaatgctgggattacaggcatgagccactgcgcctggcccagaactttttcatcttcccaaatcgtaactccatgcccattaaataataactcccaggccaggcacaatggttcaagcccataatttcactattttgggaggccgaggtgggcagatcacaaaatcaggagttcgagaccagcctggccaacatagtgaaaccccaactctactaaaaatacaaaaaagttagccgggcatgttggtgggcacctgtaattacagctacttaggaggctgatgcaagagaatcacttgaaccgggaggtggaggttgcagtgagccgagatcatgccactgcactccagtctagtcgacaaagcaagactccgtctcaaaaaacaaaacaatgacaacgaaaaaacctcccaataactccccaggccctggcaactatcattctgtttttccatctctgtgaatttgactactctaggtactaatgtgaatgaaatcatagcagtatttgtccttttgactggcttgtttcacttagcatagtatcttcgaagtttatctgtgttgtagtatatgtcaaaatttcatttccttcctttttaaggctgagtaatatttcattgtatgcatataccacatcttgtttattcattcatctgttgatggaccctcgggttacttttaccatttggctattgtgaatagtgctatgaaaaaacaaatgctgctgctatgaaagtggctgtagtcttgcagtgcctgctttaaattcttgtggctgcagacccagaagttgaattgttggatcatattaaactgtactcttttgttgacctcctctcaggccttattaataagggacagctagaaaatagtggttcttttaattcacattctacaaaagctttagaagtcttagaaatcctgttaacatatgcagatgaactagtaatgacagtcaaattgcaactattacaaatagtattattggcccagtaagtaagaactaagctaccatgtaacttggcaagttacataggatagtctttttttttttgagatggagtcttgctctgtcacccaggctggagtgcaatggcacaaccttggctcactgcaacctccgcctcctgggttcaagtgattcttctgcttcagccttccaagtagctgggattacaggtgcccaccaccatgcccggctaatttttgtatttttagtagagacggggtttcaccatggtgagccactacgcccagccataggatagactttcatgttagtcaaaccgtaggttacttttagaatatcacacatttgctaatttgctatccagatttgctgtactagaattttactgtattctattttgttttgtttttgagacagagtctcactctgttgcctaggctggagtgcagtggtgtgatctcagctcatgtaacctccgtctcctgggttcaagcgattcttctgtctcagcctctcaagtagctgggactacaggcgtgtgccgtcacgcctggctaatttttgtatttttagtagatatggggtttcaccatgctggccagactggtcttgaactcttgacctcaagtgatccacccgccttggcctccgaaagtgctgggattacaagcatcagccaccatgcccagccagaattttattttaaaattgagtacatcagtacctggctgatttttgtattttcagtagagatggggtttcaccttgttggccaggctgatctcgaactcctgacctcaagggatctgcctgccttggcctttcaaagtgttgggattataggcatgagccactgcgtctggccaatatttttgatagagaaggggtttcaccacgttgcccaggctagtctcgaactcctgacctcaggtgatccacccgtctcaagtgattcacctgccttggcctcccaaagtgctgggattacaggtgtgagccaccgtgcctggcccagatgcattgtatagtcttgaggcatttataatcagacaaacagggactcagatgcctatggcacatagctgaggatggatatgctgatgggaaggtattatgatcccagaataagggagtataattaacttgttcattgtgtattgctcagaaagcagaattaagattactgtagattggctgggtgtggtggctcatgcctatcatcctagcactttgggagaccgaggcaggtgaatcactggaggtgaggagtttaagaccagcctggccaacatggtgaaaccccgtctttactaaaaaatacaaaaattagctgggcatggtggtgggcacttgtaacctcaactacttgggaggctgaggcaggaggatcacttgaacccgggaggcggaggttgctgtgagccaagattgcaccactgtgctccagcctgggtgacagagcaagaccctatctccaaaaaaaaaggaaacgattactgtagataaacaacctcatggccgggcatgaggtggtggtgagccaagatcacaccattgcagtctagcccgcgcaacaggagggaaactccatctcaaaaaacaaaaaactcagaacaattttgatacaatattattaggaataaattaaagaatgattagtataggatagcttggttttgaagcttagcaaaagagtttagagtccagggcagaggccttttttattttttatttttatttttagatagggtctcactctgtcacccaggctggagtgcagtggcgcagtcttggttcactgcaaactctgcctcccagcctcaagtgatcctcccacctcagcttcccaaagtgatgggattacatgcataagccaccacgcctggctgaggcgtgtttttaaataattaatcttgattagttttcttgaagtctaggtatgtggtaaaaaattttaaaaattatatatatatatatatatattggagacggagtcttactctgtcacccaggctggagggcaatgtcatgatctcggctcactgcaacctctgcctcccaggttcaagcgattctcctgtctcagcctcccgagtagctcggattatgggcgcatgctgccgtgcccagctaatttttttttttgttttttagtagagacggggtttcaccatgttgcccaggctttggtctcgaactcctgagctcagacaatccacccacctctgcctctcaaagtgctgtgattacaggtgtaagccaccatgcctggccccaaaattaaaattttttactagttaatatatagtacacaattcagaatctttcacagatatacagtgaaacatctcttctacatttctcccttatccacctggtttccttcctagagacaactgttaaaaagtttcttatatttgagagatatatctgcaaatacttatgtatattcaacccttccatttttaaaaaatgcaagtatattatataaactattgtgcattttgcttcttgtgcttaagatatttcaggaattgttttacattcatacatatagagcttctttgttctttttttcaaggctgctttgtatttcattgtatggctgaaccgtttcctgttgatggacacttagatggacagcagtgttttgttgatataaatagtgctatagtgaataatcttgtacataatgtcatttaacacacattcagatacatttacaggataaatccctagaagtggaattgcttttttcaaggatgtatgcatttgtgatttcagtagatatggccacattcttctccatggagaggaggaatttgtctcccatagtcaagtatggcaaggggtggacaggcatcagggtccttgaactctgtgaaatgataggtaaatatttgtgtgtgtgtatatacatggatgtatatttttctttagaaagagtccatggttttattacgttcttaaaaagttctttggggctgggcacggtgtctcacgcctgtaatcccagcactttgggaggccaaggcaggtggatcacgaggtcaggagattgagaccatcctggctaacatagtgaaaccccgtctctactaaaagtacaaaaaaaattagctgggcatggtggcaggcgcctgtagtcccagctactcgggaggctgaggcaggagaatggtgtgaacccgggaggcagaacttgcagtgagccaagatcgcgccactgcactccagcctgggcaacagagtgagactccatctcaaaaaaaaaaaaaaaaaaaaagttctttggccagggacagtggcgaggcccagcattttgggtggccgaggcaagaggaccattgagcctaggagtttgagaccagcctgggcaaagtggtgaaaccccatctctccaaaaaatacaaataattagccaggcatggtggcgtgtgcctatagtcccatctgcatctgtccgggaggctgaagtgagaggattacctgagtcttggaggtcgaggtcaaagccagagtgagttgtatatgcacttccacacttcagcctgggtgacagagtgagaccctgtctcagaaaaaaaaaattctgtgactcaaaataggttaaagaaaccactgacttatagttagttgacctgaattaagtacactgctttgtttttctctacacagtatttttctcttacagaaagtatttgagcagaagctatgcacataattattagagatgttgtgtggagaatcattgtggaagagactggactaaatctaattcccaaccttttactgttattcctcccactcttgagaccatgttttaaaaggctttttcccccattattagactgaatttattaagcagtactttatttctccaattttattaatgagagctttagatagtttgtggtaagttttactacagggagttgaaatcctttcatctattaggagttgatagaagttgagctaaagtcaagccaatctgacatttgtattgtattgtattcttttgagacagagttttgctcttgttgcccgggctggagtgcagtggcacgatctaggcttactgcaacctccacctcccaggatcaagtgattctcctacttcagcctcctgagtagctggggttacagtcccgtgccaccatgcccagctaatattttgtatttttagtagatatggggttttaccatgttggccaggctggtctcgaactcctgacctcaggtgatccacccaccttggcctcccaaagtgctgggattacaggtgtgagccaccgtgcccagcccaatctgacattttaactagattgtgtcagtgaaaaataattcagaaaccctcattattacctcttggacttactgaagatatgaagaacaaacctttatacctgataatgtccatgtttcttttgaattctgtgtgtgtaaaataggtttaaatgagggcttacattaaattctgcaagtactattgcaaggaaaatttcattcaccgtaacagattccttagggctttcaggttttgggatattggaattaatttgtaatatacatattatcaaaagttataattcctagtttttaggtcttggagagaaaacagtagcaccatgtaatgaattagaaagttaaaagatttagttaacttaaacatagttgatagtgtcgtagaaagcccccctttttttttttttttttgagacaaagtcttgctctgtcgcccaggctgtagtgcagtggcacagtctcgggtcactgcgacctctgcctcctgggctcaagcgattctcctttctcagcttcccaaatagctgggattacaggtgtgcgccaccacacccagctaattttttgtgtttttagtagaggtggggttttgccattttgcccaggctggtctcgaactcctgacctcaggttatccacctgccttggcctcccaaagtgctgggattacaggcatgagccaccgggcctagccaagccctgtcttttttactgtattattacttggtagctcattttgaaagaggatttttctagagatgattagaatattttatgtggggaaaagtgagttagacctgtatgtcttgcttgatactggagcaaaagttaaaaggtctcagctcttgatcagcgatttctttggtttatttgtttgtttgtttgagacacagtctctctctgtcacccaggctggagtgcagtggcgcagtcatggctctctgcagcctcaacctccagggctcacgagaccctcccacctcagcctccctgagtagctgggaccacaggcatgtgccactgtccccagctaatttttgtattttttgtaaagacgaggttggccaggcgcagtgactcatgcctgtaatcccagcactttgggaggctgaggtgggtggatcatctgaggtcaggaattcgagaccagcctggcgaccacggcaaaaccctgtctctactaaaaacatgaaaattagctgggcttgttggtgtgcgcttgtagtcccagctactcgggaggctgagacaggagaatcgcttgaacccaggaggtgcagtgagccgagattgagcttctacattccagcctgggtgacagagtaagactccgtctcacaaacaaaaaaaaaaggacggtgttttgccacgttgcccagcctggtctcgaactcctgggttcaagtgattcgcccacctcagcctcccggagtgttgggattacaggtgttaggcaccgtgcccagcctattttttacctactaatcgtgctcagtaaggaaaacaaagaaaattgttacatactctggaccagaactcaaggagccatttgttgtatagtattatttgtttgccaggcaaggtggctcacgcctgtaatcctagcactttgggaggccgaggtgggcggattgcctgagctcaggagtttgagaccagcctgggcaacatggtaaaaccctgtctctactaaaaatacaaaaaattagccgggcatggtggcatgtgcctgtaatcccagctactcgggaggctgaggcatgagaattgcttgaacctgggaggcagaggttgcattgagctgagatcgtgcaattgcactctagcctgggcgacagaacgagactcagtctaaaaaaaaaaaaagaaaaaaagaattatttgttgtgaaaaacttattttaacaagttctccaaagttttatttatttctaaaataaaagattagaacaaaattcttattatgggccgttcttacagaactttttagagtgccatttgctataatgggatcctgcttttactagcaaaccttttattacaatgaatttcctagatcgagtctttattattattattttattttttaaagagatgagggtctccctatgttgcccaagctggagtgcagtggtatgatcatagttcactgcagccttaaactcctgggctcaagtgatcctcccgcctcagcctgccaagtagggaagactacaagtgtgtactaccacacctggctaattgtatctttatatttaaaagaatggaaaaagatactgtataaacagtatcactaaatataaaaaagctaagtataaacactaagtataaaaaagctagagtgatttttattagacaaaggagacctcagaacaagaaaaatattgctaggagtaatgaagcatgattcatcacgaaagaaggatcaattttttgagaagacacagcggtcctaaatgtatatgcatccagtaacagagtggaagcaaaaactgacagttgaaaggagaaatagacaaatccacaattacatttggaaattacaacattgttccttaataactgatagaacaagcaggcaaaaaatcagtaaggttatagaagatttggacaataccctcaatggactatacttaattgacatttatagaacactctgcccacattcttttcaagtgcacatggaacatttaccaaaatagaccatatgctgggctacaaaacacatttcaacaaatttaaaaggattgaaatgtgtagtgtctactctgactacaatggaattaaattagaaatgaaaaagatatctggaaaatctccgaatatttgaaagtgaaataacatacttcaaaataacctttaggtcaaagaattcacaaaggaaattagaaaatattcatagctaagtgaaaatgaaaacacaatatatcaaaatttgtgagatactagaaaatatttgtgagccgggcatggtgactcacacctgtaatcccagcactttgggaggccgaagtgggcggatcacgaggtcaggagatcgagaccatcctggctaacgcggtgaaaccccatctctgctaaatacacaaaaaattagccgggcgtggtggcaggtgcctgtagtcccagctacatgggaggctgaggcaggagaatggtgtgaacctgggaggtggagcttgcagtgagccaagatcgtgccactacactccagcctgggtgacagagcaagactccgtctcaaaagaaaaaaaagaaaatatttgtaattaaatgaaaatgaaaacacagtatatcaaaatttgtgggatacagctaatacagtgctttagaaggaaacttcagctttaaaataaaggtctaaaatcagtgacctaacattttgccttaatagaaagagaaatctaaatagaagagaaataataaagagctaaagtaaatgagatagaaaacaaggccgggtgaggtggctcactcctgtaatcccagcactgtgtttggccaaggtgggccaattgcttgagtctaggagtttgagaccagcctgggcaatatagcaaaatacaaaaatactaaaatacaaaaatactggaagaaaaaacaaattaaaaaaaaaagaaagaatgagaatctgaataaccccatatttattacagaaattggattaaaaatcttcccacaaggccaggcacggtgactcatggctctagtcccagcactttgggaggctaaggcaggaggatcacttgagcccaggagtttgagaccagcctgggcaatatagcgagactcatctctacaaaaaatataaataaatgaaaattagtcaggtgtggtggtgcacgcctgtggtcccagctacttgagagactgaggtgggaggattgcctgaacccaggaggttgaggctggaatgcagtggcacaatcagtgtcacaaacaaacaatcaaacaaagtcttcctaaaaagaagaatccagacctacatggctttgttggtaaattctatcaaacatttaaggaaaaaataccaatttttttttttttttttacaaatttcacaagacatttatgaggccagcattaccttgataccaaaccagaccaagacattaggaaaaaagaaaactgtagctcaatatccctcaacatatatatagaaataattaacaaaatactagaaaattgaatctagcagtgaataaaaccataactaattggattatcccagttgcaaagttgatttagcattagaattcattgtaattcaccatattaatagaataaaggagaaaagctaagtggctttgtaatagttacctaaaaagcatttgactaactgttaacactatttgtgataaaagctctcagctcactaggaatagaagggaacttctttaatctgataaaaggcatttatgaaaaatatataagtaacatcatacttatggtaaaagagtgaatgctttctatataatactccaaacaagtcaatggtaattgttttcgcaacctctattaaacatgttccaaaggtcctagccaatgaaataagacaagtaaaaggaataatcttacagattacaaagtaaaagtaaaactatttattctttagatgtcatgattgtacacatagccttaagcaagctataaaaaagctactagaatttaagtttagttagaatataaatcaatttgcaagatctagttgtatttctcatactagcaatgaacaattggcagttgaagtaaaagcgaaaaagaaaagcaaatcatttataatagcatcaaataatgtgcaatgttaaaacattccccaagaacagaagaaattattttatattcttgtttcatggatgaaggcattcaggtgcaaaggattaaagaacattaatttgttcataagcatgtctttataaacatctatgtagtagatactgtgctagggatatagtagtgaataaaaacattgacccgtgccctcataaaatttataatctaatggaaattgaagggagaaataaatgtaggacctcagtttccggctttggcttaactttttttttttttttttttttttttgagacggagtctcgctctctcgcccaggctggagtgcagtggcgcgatcttggctcacggcaagctccgcctcccaggttcacgccattctcctgcctcagcctccccagcagctgggactacaggcacatgccgccatgcttggctaatttttgtatttttagtagagacggggtttcactgtgttagccaggatagtcttgatctcctgaccctgtgatccgcctgccttggcctcccaaagtgctggaattacaggtgtgagccaccgcaccgggcctggcttaacattttttatttagatgagtggttcaaagcttttactttttagttataacttttttttttttttttttttgagacagggtctcactctgtcacttaggctggagtgctgttgcacgatctcagcccactgcaacctctgcctcccgggttcaggtgattctcatgcctcagccaccctagttgctgggattatggacgttgtgccaccatgtctggctaatttttgtgtttttaggagagatggggttttgccatgttggccaggctgctcttaaactcctggtctcatgtgatcctcccgccccagtctcccaaagtgctgggattacaggcatgagccacagcatctggcctagttatatctttttttttttttttttgagacagagtttccctcttgttgcccaggctggagtgtaatggcgtgatctcagctcactgcagcctccccctcccaggttcaagccattctcctgcctcagcctcccgagtagctgggattacaggcatgtgccaccaccccagctaatttttttttttgtatttttagtagagacggggtttctccatgttggtcaggctggtctggaactcccgacctcaggtgatccacccgccttgacctcccaaagtgctgggattacaggcgtgagccaccacgctcggccagttatatcttaaatattgtgacttgttgaataatttggcccctatgggtggcaagttattttgttgtaatacatgcttggtagttcatagggtggttgaaactggttggttggttaaaatttcatgttaaggatggtccatgcaggactcccatataggggaaaagaagtaactaataatcttcattgagcaccaactatatttcaggcactgtattaccctcatccccaacatatagtactgttttatttaatccttgaaacatccataaggtaggtggtttttactcttgaaatccacagatttcaagaagagctaatagaacttcagtgatttgcccagtttcatacagtggttcagagatttagtcctacacctatttgactttaaactgtcaggaccagctgttctctgttgatcatacccttggaccatcccatgtgttcctagtcaggaggaaatgcaagtaaatgagattaattttttaggcagggcatggtggctcatgcctataatctgtgcactttgggaggccaaggtgggtggatctgtagagcccaagagtttgagaccagccagggcaacatagtaggaccccacctctaccaaaaaattaaattaaaaaaagccggacatggcggcatgaacttgtagtctcagctacttgggaggctgagatgggaggattgcttgagcctgggaggttgaggctgccagtgagctgtgatggcaccactgcactgagcctgggcgacagagtgagaccttatctttaaaaaatgtatatatatagtgctaattttgagtctattttattatttatttatttattactttgagactgagtctcactctgtctcacttagtggcgtgatcttggcttactgcaacctccgcctcgcagtttcaagtgattcttcttccttaaccacctgaatagctgggactacaggcgtgcgccaccatgcctggctaattttggaagtcttggtagagacagggtgttgctgtattgcccaggtctcgagttcctgacctcaagtgatccacttgactcagcctcccagagtgttggaattacaggtgtgagccactctgcctggccgtgattttattttaaaagtacgtcactcacaagaaaaaacactgtcaggatttcttgtcatgcacctcacagctgatatgtcaaaatgccagttttatttcttattttaaaattttgttttagaggcaggatcttactctgttgcccagactaaagtgcagtggtgcagtcatagctcactgctgtctcaaactcctggacttaagtgatcctcacaactcagccttctaagaagtgaagactacagtcatgcactaccatacccagattttttttttttttttttttttttttggtagagaccgggtctcactacattgctcaagctgtcttgaagtcctggcctcaagtggtcctcccgccttagactcccaaactgttgggattacaggcatgagccaccacatgcagctcaagacaccagttgtttttttcttcttcttttattctatttttttgtttttatttttgagacaccattttaaaaatgcttttaatacactgttttcaaatttttttgagacatattcttgctatgtcacccagaatgttgggtggaatgttgactcctgcatcttattgttataccaattccaggctggagcgcagtggtgcgatcaaggctgactgcaacctccgtctcttgggctcaattgatcttcctacctcagcctccttagtagctgggactgcaggtgcatgccatcatgcctggctaattatttattttttttgtagagatggggttttgccatgttgctcaggctggtctcaaactcctgggctcaagtgatcctcctgcctcggcctcccgaagtgctgggattacaggtgtgagcctccgcacccagtcaatacactttaatccaagtcagtgtctatttaaattttaagttagtttaactctgagccatgggcctgtaccttggaaatatgtaatttagagtcataagtaacagttatctagctgagagtcatatgtgggttataccaaatgtactgccatcatgtgattataggttagtagtgtaatttttggaattggcaggtcacagatgagattgccatggcttggtggaaagctctcccaactgtcttctccagacagataggtagaacctggaaccagtgctaggacgtgtgtgtatgtaggaggtagtcattggttatatgaacttaaagttgctatcttaacttctgggccttgaaggaaggccatattagtgacatctgcttagttctttatagtaaacttgttaacgcttgtgccacagtcaagaaccagaactggaatgttgactcctgcatcatcttacaccagttccagtaggaattttgttatacagtttctgctggagatggcagtgggattttttttcttttttttcctcatatgtgaagtaatagtctgttcacaacagaagaagccacaaaactaaacttattggtcactgaattttcttcaaggttacatacctcttgggtattttaaatctagattatgttcatttttatatttttgttctcatttttctatttctttgttttctttactgtgaatgtgctccaggattttgtacagagcttctagtttctgtctgtaatttaaatattgaatttgttctcgataaaagagaactttttagcataaagagaaagctaaaaacatagattataggccccataatgaaatgtgtagtagttgcatatggctagtgcttctctgtgtattggaattgtactgttttcccttagaatttgttttttctttaatgagtaattttcagttatataaagaatgtttgcatacttttataataatgagaactgtaatagctcattttccactcagcagatgattttggagatttactaggtagatgttgatacatacagacctagtttgggtcattgttctttaaataatcatcctgtaaacacatttatttacagtgttttgtcacttattgaaagtggggttttttttggcggggcgcgctgagtcacatctgtaatcctagcacttagggaggctgaggcaggagaatcgcttgaacccaggaggcagaggttgcggtcagccgagatcgtgccattgtactccagcctgggcaaaagagcaaaactttgtctcaaaaaaagaaaaaaaaaaggtaaactttttttcacttgacctagaactcttctgtttatacacatcaaggaagaacttaacagatttcacatctgtttcacttctaggaatgctgcaaggtctctgggagtcaaactattttgatggctattttgactctggtatggtatgaaaaggtagtactactagtgactaaaataaaaagcatagagacctttagtttttttaaatggcgttatcttctttactggagtatggggtagtttgactttgttggcagctatgcttctttatacctaggcaggcgtaacttttgtcttctgttctcagtcccttttaagcagccaatttggtctaaggaggaaatgaaaactttagaaactcagtaaatgttgacatttaaacttttacaggagtgaaagattaacctttggcctctattctacaagtttttcttagtttatatgagcctccttcgtggtgctaaagggctggtagtcaacatttgcatcttaacctcagtgttcatggatttataatttatccacagaattttctctaggcttgtaactaaagtattttttaagatccccctagaaaaaaaagtacattttaagtatattagaaacatgttttatttttgcaaactgtactcttttaaaaacaagaaacttgactcttgttcatcttctaaactgtccatttgatttttttacttagaaaattattatcagcaggagacaggggaggtagtttaaatgttgtcatagacaatataacttttatggagagatcttatcaaaattagttttgatttaacaaatcagactagttaaatttgtttaaatttgtgaaattaacaaatttaaaccagtaaattaaaaaaatttcctagtttttttttttttttttttgagtctgtgggtggctcttttaaaggataattttccctcccaagtgatatggatattagtaagcattctcccagatagctattatatagcaaatgacaagtaacagactattttactaagaaaataagataaaataccacatagttaaacttaaataatgtggacaaagaagcatttaatgtacaagagtatgaatttaccattcaatttatggttttaggaaaactagaaaagaggaggaaaaaacaataaatatgcaagaagaaataaatacattgcaaaacagaagaatgggaaataatcaagagttggaaaattaggaaacaaaaggcaaaatgaaggagagtacatcggatataacaaaaggtactgaggacttacaaaaagaaaatactggaagtgaatgttgttagttatatgaaagtctcaatgaataaataatttcaaagatactaggaattaatactgacgaaataagacataaaaatcagaataggggccgggcgtggtgtttcacgcctgtaatcgcagcactttgggaggccgagggcaggcggatcacctgaagtcaggagtttgagaccagcctgggcaacatggtaaaaccctgtctttactaaaaatacaaaaattagccaagcgtggtggtgtgcgcttgtaatcccagctacttgggaggctgaggcacaagaatcgcttgaacccgggaggtggaggttgtagtgagccgagattgcaccactgcactcctgcctgggcaatagagtgagactccatctcaacaacaacaacaacaaaaccagaatagactcctgtaaccaagaaaaaaattgaggcgattataaaactacttcctcctctctaggtgttggtgatttctcctaaccttttattttatttatttatttatttatttttcgagacagggtcttgctctgtcacccaggctagagtgcaatggtacaaacatagctcactgcagcctcgacctcctgggctcaggcagttcccctacctcagcctcccaagtagctgggaccacaggcatgggccaccacacccgggtaattttctaattttttgtagagatgggatcttgctatgctgcccaagctggtctggaacccttggggtcaagtaatcttccctcctcagcctcccaaattgttgagattataggtgtgagccaccactcctggtctctcctaacctttaagaagcggatacttctcatgttgaataatatgatagaagtaaacaactctgacagcaaaatgacaaacatgaaaaagtaaaagtgaatgtatagatgtttaaaataaaataaaaatactagtaaatggctacagcagattattcctttgttttgtttcaagtaggttatcctaggaatgtcaaacaagttcgtgtttaaaaactcagtaatatttctagagtcagtgctgtggtttgaatgtgttccttccaaaattcaggtgttgccagtgtattaagaggtgattaggtaaagagagctcctcctctcatgaatgggactaggtatccttttaaaggcttgatggcgtaaccttgtctgtttttacaccttgccatgtgaggacagtgtccgtcccctcttgcccttctgccttctactttgtgaggatgtaggattccttccctctggaggacacagtgttgaaggcaccatcttggaagcagagcctggaccctcaccagacacctaacctgctggtgccttggtattgtacttcccagcctccagaactgtcagaaattaaatttctgtttttcataaattacccagtctgctgggtgcagtggctcatgcctgtaatcccagcactttcggaggtagaggcgagtgtactgcttgagccattcgagaccagcctgggcaaagtggtgaaaccccgtctctacataaacacaaaaattagccagacgtggtggcatgtgcctgtaatgccaactacttgggaggctgaggcaggaggattgcttgagcccagaggtcaagactgcagtgagccaggattggaacactgcactccagcctgggtgacagagcgagaccctgtctcaaaaaaaattacccagtctcaggcattctgtcataacagcacctacagactaagtatggcttaatggtgagaagtactttttttgaaccagatagccttggttcagatcttggctttgcttcctaatgactgtgtgaccttgaatgagtttactgatcttcttatgctttcctcatctgtaagtgagtaataagagcagctacctcacaaggtagggcaaccataacagataccacagactgtgtggcttaaacaacagaaatttattttcttatagttctgaagactagaagtgcaatagcaaggtgtcagcaggtttggtttcttctgaggcctttctccttggcttgcagatgtctgcctccttcctgtggcctcatattgtagtccctctgtgtgcatacatgtctgtgcgtgctcacttgctctctctcattctttgtcctgatctcctctcataagaataccagttttaatggatttacgcttctatctccaaatacactaaagtactggagattagggcttcaacataggaattttgggaggacacagttcagctcataacaggttgttatgagggttaaatgccctgatatacctggccctagcaaatgctacctaagtgttggttatcattattattactttacaataataagtaatacataaaaccccaaaaactttagaaaaatcttttttatttcagagtaattagagattggcaggaagttgcacaaaatgtataggaaggttctgttcatgcaccgtgcatctctcctcatgtataattctagtatgttattaaaaccaaaaaattgacattggtacaatccataggactaattcacatttcaagttatacatgaatcatttgtgtgtgtgtattacacttctaggcaattttatcacatgtgtagcttgtaaccactacagtcaagttgcagaaactacttcatcataaggctctttcctgctacgcgtttgtagccacacccactcactctcccttgaaaacttaattcttgacaactacagatctattttcctctataatttcattatttcataattaatatatataaatggagtcacaaagtacacaaccttttattttgagacagagtctcaccctgtcactcaggctggaatgcagtggtgcaatcttagctcactgcagcctctgcctcctgggttcaagtgatcctcccatctcagcctccagagtagctgggactacaggtacacaccaccacgctagctaatttttaaattttttgtagagacagggtctcactatattggccaggctggtcttgaattcctgggttcaagcaatcttgctgccttggtctcccaaagtgctagaattacaggtgtgagccaccgcacccagcctacagctttctgagattggcttttttcacttggcataatttccttgaagttccaagattttgcatatataaataggccattcctttttattgctgtgcagtgttccatggtgtggatatagtacactttacttaaccattgcctccatgaggacatttggtttgtttccagtttttggctattatgaacaaagctactctgaacattcttatagaggtttttacaccaacatgtttttctttctctggaataaatgttcaagagtacaattgctgggtcaaatgataagttttaagtgcatttttagttttaaaagaaaccgtcaaaaaagctttacctttttacattctcactagcaatatatgtaagtgattcagtttctctacatccttgacagtgtttagcgttgttgctattttttattttaaccattcttaaaggtgtgtaatgaaatctcattgtggtttaaacttttatttccctaaaggctaacgtgttgaacatcttttcttgtgctcattagccatctttacatcacccctcctttttttttttttttttttttttttgagatggagttttgctcttattgcccaggctggagtacaaatggcatggtctcggcttactgcaacctctgccccctgggttcaagcaattctcctgcctcagcctcccgagtagctgggattacaggcatgcaccaccacgcctggctaattttgtatttttcagtagagacggggtttctccacgttggtcaggctggtctcgaactcctgacctcaggtaatccgcctgcctcagcctcccaaagtgctggtgagccaccgcccccggcctacatcctctttagtaaaatgtctattcatatttttttgccaattttctaattggaattctttagatagtctaatctcaagttccttggtagatgtgtgacttgaaaatattttcttccagtcagtaatttgtttcctcatcctgtttacagggtcttactctgtacttttgatgagcttccatttatcagtgtttccttttgtggattagagcttttggtgtcaagtctaggaactgttggcttagttctaagttgtagagatttttctccccttttttcctaacagttttatgttttacatttaagttcttgatctattttgtttttttctcttttaaaaatttattaattattattattattattattattattattattagagacgaagtttcgctctcgttgcccgggctggagtgcaatggtgcgatctcagctcattgcaacctctgcctcccaggttcaagcgattctcctgcctcagcctcccaggtagctgggattacaggcacccgccaccatgcccagctaactttttgtatttttagtagagacggggtttcacaatgttggccaggctggtcttgaacaccagacctcaggtgatccacctgcgtcggcctcccaaagtgctgggattacaggtgtgagccaccacacccggccgagttaatattttataaggtgtaagcaaggtgtttttttgttttgttttgtttgtttgttttgcctatgcatctagttgttccagtagcatttatttaaaagtctctttttttcaatttatgtaatttattaaattgcctttttttttttttttttttaaagagacaggtttttattctgttgcccaggctggagtgcagtggtgtgatcataattcactgtaaccttgcactcgcactcctgagctcccgcctgagccttctaattagctaggagctaggactgcagacagtgccaccatggctggctaactttttcatttttttgtacagatgggatctcgctttgttgcccaggctggtctcaaactcctgggctcaagtgatcctcaagctatcctcccacctcatgctctcaaagtgttgggatcacaggggtgaaccctattaaattgcttttatacttttgtaaaaaatcagttggatatatttatgtgggtctgttttttttgttttgttttgttttttgggatggagtctggctctgtcacccaggctagagtacagtggtgcgatcttggctcactgcaacctccgtctcctgggttcaagaagttctctgcctcagcctcctgagtagctgggattacaggcacctgccaccacgtccagctaattttttgtatttttagtagagacagagtttcaccatcttggccaggctggtcttgaactcctgaccttgtgatccacccgcctcagtcacccaaagtgttgggattacaggtgtgagcccaccgtgcctggccaagggtctgtttttataagctgtgacgattaaatgtgctaatatagaatgtcttgcctgtaaagtgctacattatgtgagcttttgaggattgtgtttaaaaaaagtgctacgtgttagttattattgttattactttacaacacagcaaataaataataatttttttttttttgagatggagtctcgctctattgcccaggctggtgtgcagtggtgcgatctcagcttattgcaacctccacctcctgggttcaagcgattcttctgcctcagcctcccaagtagctgggactataggtgtgtgctaccatgcctggctaatttttgtatttttagtagatatgggggtttcaccatgttggccaggctggtctcaaactcctgacctcaaatgatccaccacctcagctgcccacagttctgggcttacaggtgtgagccaccatgcccagtcaataataattaaaaaaaaaaaatttggataaactcaatagtcattcctactttgtaattttaaaaacaatacagtttcaaaaactttttaattgtggtaaaatacacataacataaaatttaccatcttaaccttcttttttttttttttttgagatggagttttgctcttgttgcccaggctggagtgcagtggcgcgatcttggatcaatgcaacctctgcctcccagcttcaaaccattctcctgcctcagcttcctgagtagctgggattacaagcgcccgccaccacacccagctaatttttgtatttttagtagagatggggtttcgccatgttggccatgcttctctcaaactcctggcctcacgtgatccacctgcctcagcctcccaaagtgctgggcttacaggcgtgagccaccgcgcccagccctgagccaccgtgcccggcccaccatcttaaccatttttaagtgtacagttcagtagtaaatacattcatattgtttgcatccaatttccagaactttttttgcctaggaaaatgaaaactgaaatgcccattaaacaactcctcatctctaccttcctccccaacccctggcagctaccattctactttctgactctatgaatttaactattataggtgcctcatctatcacaaagtatttgtcttcttgtgactggcttattcacttagcataatgttctcagggcttatccatgttgtagaatgtagaatttcatgtatacaccacattttgtttatccattcatatgttgatggatatttgagttgcttgcaccttttggctattgtgaataatactgccgtgaacatggttgcacagctatctctttgaggccctgctttcaactcttttgagtatattcccagaaatggaattgttgtatcatacgataattccgtttttgaggaactgccatagttttccatagtggctatgccattttatattcccatcaacagtgtgcaagtattccagttactccagatcctcactaatacttgttattttgtagggttggttggttttttgttttcttggtagtggtcacctcaatggatgtgaggcggtgtctttttgtgagttgcagtttcctaaaattagtgattttgagcatcttttcatgtggtcgttggccatttttatatctttggagaaatatctgttcaagtcctttgcccattttttcattgggttgtttattttgttgttgttgagttgtagcagttattcatatatttgggttattaatgccttaccatatatgtaaattgcaagcattttctcccattccatgggtttcctttttattctgttgattgtgttgtttaatgcacagattttaaattttgatgtctattttatgtatttttactgtttttatctctgcttttggtgtcacattcgagaaatcattgctaaattcaacgctgtaacactttctccctgttttcttcttcttttttttgagatggagtctctgtagcccaggctggagtgcagtggcgcgatttcagctcactgcaaactcctcctcccgggttcaagtgattctcctgcctcagcctcccaagtagctggaattacaggcgcccgccaccacgcccagctaatttttgtagttttagtagagatggaatttcatcatgttggccaggctggtctcaaactcctgaactcaggtgatccgctcacctcggcctcccaaagtgctgggattacaggcatgagtcaccgcgcccggctctccctgttttcttctaagagttgattatagttttagttcttttttttttttttttggctgtaaatttattcaatgcaaaagaatcctctccagttttactgaggtggctgaccacgtccacaaccaaatccgcctctaaactagaattcggttgctgacccagccccagcctcggctttcttgtcggcaccaggtagcacagcactcctcatatacagacctttaggccgaggcctgccagtctctggacggctacggcgtagggtggcaggcacaatctccgggggcagatgaaggtaatcacggagatactggatacactcattggtaaggtaccagtagaaatgtctccaggcaaagtgttctttcacgtagcctcggcacttgagagactgcatggccttcatgacatgaaggttgggcacattcttgtctgccagctccgggtgcttaggcatgtggacatccttcttggccaccatgactccctccttaaaaaggagttcataaatggcaatccagttcttcttaggcatcaacatctctgcagctgcagggtccggggccggggctggaaagctagttttagttcttatgtttaggtctttgatgtgttttgagttaatttttgcatgtggtaatggtccaactttcatttcatttgcatgtacatatccagtttctccagcaccattttttgagaccgtctcactctgttgtccaggctggagtgcgctggcagtaatctcagctcactgcaacctccaccttgcaggttcaagtgattctcgtgcctcagccacccgagtagctgggattacaggcgtgtgtcaccatgcccagctaatttttgtatttttagtagaggttgggttcgccatgttggccagactggtctcaaactcctgacctcaagtgatccgcctgcctcaccctcccaaagtgctgggattacaggcgtgagccaccatgccagcctccagcaccaggttttgaaaaaattgactttcaccattgaatagccttggcaccttatcaaaaatcatttgaccatgtatgtgaggatttccttctggcggtccattcttttccattgatatctgtctgtctttaatgccaataccacgatgttttgattactatagctttgtaattttttattttttattgatttatttatttattttgagacggagtctcgctctgttgcccaggctggagtgcagtggcgcgatctcagctcactgcaagctccaccttccgggttcacgccattcttctgcctcagcctcccaagtagctgggactacaggcgcccgccactgcacccagctaattttttgtatttttagtagagacggggtttcaccgtggtctcgatctcctgacattgtgatccgcccgcctcggcctcccaaagtgctgggattacaggcgtgagccaccacgccggccgaattttttaaaattaattattattattattttttgagatggagtctcactttgttgcccaggccggaatacagtgatacaatctcagctcactgcaaccttcacctcccaggttcaagcgactgtcctgcctcagtctcccgactagctgggactattggtgtgcaccatcccgcccgactatgttttgtaattttagtatagatgggatttcaccgtgttggccaggctggtcttgaactcctgacctcaggtgatccgcctgtctcgacctcccaaagtgctgggattacaggcgtgagccattgcgtccggcatgtagtaagttttgaaatcaggaagtgtgggacctccaacttagttctttttcaagattgttttgtccgtttggggttttagcccatttatgcttagtgtttcattattgggttgctaagcttgtggcagttattgatatcctactgttcaaggtcatcaccaaggtctgatttttcacagaaaaaatttgcaacctcgggcataaatgggttaatatagtttttaatggtaaagcattagaggtgttaccatgaaaatgaagaacggaaaaatgttttctatgattattatttcatgttttattcagtgcagtaaaatgtaaaacaaataagaggtataaattatagaaaggaagataaaaccttgttatttacaaatgctatgattttatacctagacaactaaatggaaaggaacaaactgggcctggtgcagtggctcatggctataatctcagcactttgggagtctgaggtgggcggatcacttgaaggcaggagttccagaccagcatggccaacatggtgaaaccccttctctactaaaaatacaaaaaaattagccaggtgtggtggtgtgtgcttgtaatcccagctacgtgggaggctgaggcggaagaattgcttgaatctgggaggcaggggttgcagtgagctgatatcacacctttgcactccagcctgggctacagagcgagactccgtctccaaaaaaaaaagaaagaaaggaaaagactgaaaatgattaagaagaacaattcagtaaagtgactggctaaataaaaaccatgaaaattaataatttctgtatatcagcagtaacataaaaataggaaaaattgcttttaaaattaagtaataaacatgtttttattttactcataactgttttgttttgagacaaggtcttggctctgtcacccaggctggagtgcaatgtgcagtggcgcgatcttggctcattgcaacctctacttctcgggctcaagcgatctgcccacctcagcctccaagtagctgggaccacaggtgcacaccaccatgcctcgctaattttttgtatttttggtagagatggggtttcaccatgttggccaggctggtctctaactcctgagctcaagggatccacccaccttggcctcccagagtgctgggattataggagtgagccactgctcccagcctgttttgagttaatttttatgttgatgtgaaggaagggtacaacttcattgttttgcctgtggctatctactcctggcaccatttgctgaaaagactattctttccctcgttgaattgtgttggcacccttgtcaaaaatcatttgaccacaattatggatttattcctggactctcaattctattccattgatctaaccttatgctagtactgtactgtcttgattactgtggctttgtttttaggtgatgaagtatgagccttcctgctttttcaggattggttcctagcaattccatatgcatgttagaatttgcctaccaatttctacaaagaagtcagctggggccgggtgcggtggctcacgtctttaatctcagcacttcgggaggcggaggcgggtggatcacctgaggtcaggagttcgagaccagcctggccaacatggcgaaacaataataaattattattgtttataatataaaattatttcttcctcttgatgctactgtgtatggaattattttcttcattttcagattgttcaattgcaagtataaaaaaatggatttttgtctatcagtcttgtattctacaaccttgctgaactagtcattagttataaaacgaaggctccttgtggctgttttatgccctgggtctctcctacaaactagccagtctacagtctaggctgtatcttcattacatccaggaacctctttccacttgcgtagtaccacaacccctattgtttttgggaacacccttagactgaaacttgtcacactcttgcaagtgaagttaggtcctttgagatactctgtgttcctgcttcttcccttaggcaaagtatctgagccagggttctagtggtagactaggtggggacaatagcaagcttttctgtgaatgctaccccagctctaggagggtatggggcaggtcagcagcctggggtcctcttggcttgtctctcctgttgtggaaccactgtcccatgagctgggagagagggtcgttggattcccagtattctcagtgtgtcatgcctatgaaagagccccttttccacaagtagggattgagcagaagaagggagcccctgcctctgagagtacttgcctgagacagcctcagcaacagaagtcagggcaggatgagaaacactgaagtcgcattcttcccaggaataaagaaagccctcagggatgggtgcggtggctcacaactgtaatcccagcactttgggaggtcgagacaggcagatcacctgaggtcaggagatcgagaccagcctggccaacatggtgaaaccccatctctactaaaaatacaaaaatcagctgggcgtggtggtgggcacctgtaatcccagctactcgagaggctgaggtgggagaatcacttgaacccaggaggcagaggttgcagtgagccgagatcacgccattgtattccagccggggtgataacagtgaaactctgtctaaaaaaaaaaaaaaaaaaaatcatcaggcttcttcttcagttttgctatcctcttaggattaaaatttatttatttatgatttttttttctttcagggaccacttaatagtgagtcttccaaccagagcttgtgcagcgtcggatccttgagtgataaagaagtagaggtaagaagctatgttcatggcaggacttttcatacttgtacgtttgggccaggtttggtggctcaaggctgtaatcccagcactttgggaggctgaggcgggcagattgcttgaggctgggagttggagaccagcctgggcaacatagtgagaactcgtttctacaaaaaaacttagcagggtgtggtggtacacacctgtggccccagctacttggaggtcggaggatcgtttgcacccgggagaatgaggctgcagtgagctgtgatggcaccactgcactccatcctgggcgacagagtgagacccccatctcacagaaaagatagcactgcttaattaactccctgggtgctgttagactctgtgtaaattgctcccctttgagctgtgtgctctttgcatacgtacagttatgatgtggccctcacgggtttttattataatcatgtgtggatcttacatgtcttaaaatttttgcatagttgccatcagtaaaggatagaaatttgcaatattgttcctgtttaaatggaagataaaattgattgactgattttatttttacaacttttttcgagacatggcctcgctctgtcatgcaggtcagagtgcagtggtgcaatcatagctcattgtaacctgacactcctgaactcaagcagtcctcctgtctcagcctcctgagtagctaggtgccaccgtgcctggctaatttttaaaaatatttttagaggcggggccttgctatgttgcccaggctggtctggaacccaagccatcctcccacctcagcctccaaagtgctgggattacagacatgagccacagtgcctggcgaagactttttgttcatttgcttaactattcacagccctcatgcatgagattttttttttttatttggcatataacctagctgcctgtagatgggtctaagtgtaagtctgtagccacctactttgtactttgcagatctctcctttttggaaaaaagattggatttaaagtagaagtagtgtaacaacagttttctgagaacttaacatatggtggacatttgtcctacatttgtgctctattaaatatcttatgaaggttttgtagcagctctgatttacagatgaataaactcaagctctgatattttaagcagtttgccaaaaattgtgtggatggtttggttctagaccctaatactctttgttatactcagttttaagaggaagacagtgattcaggacttgtctgggccagttatatctgtttatatattcaatattttgtgtatactcgctgtttttcctaacgtgaaaaatttaccaaaatgctaattgtgacttatatggtatttgacagactcccgagaaaaagcagaatgaccagcgaaatcggaaaagaaaagctgaaccatatgaaactagccaaggtagtaataatttcgtatcaacaaaagtactcaattctaatgtacttagatagaattttctaactcatactaaataattagtttgtacacagggattcctgataaaggaggtttgtgtatcttaagggaatatcagactgtttattacagacttgccatttggtatacacctgacagaacagtgttagttcttcggggactcttttgttttccctgttgtaagctaacaatcttcttaaccacaggtttttctttacaccaaatatatattgtacaaaaaagaggttatgtcagagttttaactcttgtcttttgttagatcagtgatttgttaatgacagccagctaaaagtgcttcatttacattactgtcctttctgcctactgttcttccgtggcagttgtttagttgaatattggaacccattgggataaatctgtaaacatgatggttataatgccaaatatctttatataatcaaagaaagaaaaaatggcttggctttttttcctcccattctaaggaatagaaagcccagtcttgttgcatccttcttatcttttaaaatctacagataattcattttgtctttgggagcaaaattctcccaaagtgacaagaaaaattacagaatcttaaagctgtgaaaaattcttcctttcactgcttgttcagtcctttattttatggaggaaatagtctgttcttgggctaaggtattttggctcatttgttacaagtaaagctgacacttgggtttatagcaatgtatgtagttactgaatgtatagtacattttagtgaatgatggtttatatgtgtattggaaaaactgtatttactttggtttcattttcagggaaaggcactcctaggggacataaaattagtgattactttgaggtaagttacattttttgaaaaaacaaacaaacaaaacaaaacaaaaaaactctatagtgattttttttaaaaaaccctaaatccttgtgttcatttgaggctttagaaagtaatattttggccaggcgaggtggcttatgcttgtaatcccagcactttgggaggccaagatgggaggatcgcttgaacccatgagttcgaggccaacctgggcaacatggggaaaccctgtctctacaaaaaacagaaaaaattagccaggtgtggtggcacacacttatagtcctggctacttgggaggctgaggtgggaggatcacttgagcctgagaagtcgaggctgcagtgagccatgatctactgcactccagcctgggtgacagtgagaccctgtctccaaaaaaaagaaagaaagaaagaaagtaatgttttgcctttactgtactcttcttccctttctccccatcttcatcagttaatgctgccccatctctcaataagagaaaactgctgctgccttcctaaatttaaatttattatgtgtcttgtctgtgatgatataagaattcacaaatgaggtgatttttctcttggccagacgaggttttgtgtcttacaaagattgaggtggaatgacttggactcttcttttgtcctcctccctttagtacagtggaacatgtagtgagttccctgacccatcgttagtggttactaaagacactaacatccactgcaccactgcatttctgcttcgtgtatttggagacaagaagggaaaacattcttctctcatgtcctttcaaaatcatgtataccttcagctttctagccatgttttctttatatcttggtatatttctgctggagctccttcttaaaaatctcattaaaaattagcagaatttgacttgtgtggcattttctctctagagtaagatgtgttaacttaaaggggccatataattaagatctgtttgtgtattaatcttttactctccttatctgaagcatagtactgttttgaattattcatatcggtttttccctgttggccagtttgctgggggaagcgcgccaggaaccagccctggcagaagtgttccaccagttgcacgatcctcaccgcaacattccttatccaatcccttaccggtaagcattcacctggagaaatttgacacctgttgtaggagacaagatgcccagaaacactcaagcaaagtttctctttcattaattacccacagggaatgaagcattagggagaaaagttcatagttttacctatgaatcccttactttgattcaaatctgttgtcagtaaattagctttttacagaagagccaatcctaatatctctatataataaattacctctaatcctacagctcagtagtctatcaaagaattgattccaatcgaaacattaggttttttcccttgccaaatttgtatgttcctttagggtttatttttattttaaaatttgaccagcttctggcataattgagttatctccagagcttattcagtaatgtactagaaaaactaatgctatgcagatttgtgataggtatgtttccagcctgtaaaagagatctgaaggtcttaaaaacattatacctaagttaatggttctcagttggtggcagttttgcccctcaggaacatttgtgaataactggagtcattattggttgtcactgctcggaggtatggggatgacactataggcatctactgggcagaagtcagggatgctggtaaacattctgtaatgttaggacagcctccctgcaaagaagaattacctggtccaaaatatcagtggtgccaaggttgagaattcctgagtaagctaacataggattatgtttatttgctccagtgtcttcgcattatttgttgatactgtgtaagacctcttactcaagagtgtgctctatcccctaataccttaggtattgcctctgggatcttgggagacagggtctctgggacagaagtttttattttagatcactgatttttaggaaagttgtttttctttgccttggtagagttgtgtaatagtactcatttcctaagcgatttaggcttctgtattgttaaagtattttaaaatgtactttctccccctctactgtctcataaaaaccttcattaggattattgtaattattaaagcacttatgaaaacataagttaaacttatgaaaacaactaagaagttttggctattactgtgtcatccttgccatatatatgtaatttttttttttttttttgagacagtcttgttctgtcactcaggctagagtgcagtggtacgatcatgactcacagcaacctctgcctcgtaggctcaagtgattctcccaaatcaacttcctgagtagctcgtagtacaggcatgtaccactacgcccggctaatttttgtatttttttgtagaggcgtggtttcaccatattgcccaggctggtctcaaactcctgagatcatgtggtctgcctgcctccacctcccaaagtgttgagattacaggcattagccattgtgtcagaccatccttggccatagtttaaaatgttagaaatgtttgtttgatcatagatccaatttgggcaggttgaggtttgttagttaactgttgaagaggcctgtgtctctgtttttcttaagtttcaaaccaattaaagtctaaaagatattaaatgagattgcagattatctatttgggacagatacgttttgtagaatttctcgatgttgtctatcactcttttcttcctgaaatgcctttttcatttggtttttaatggtgtgaccacccatctctcatgtgtcagtttaggttgaatcttacctgaagacaaaagagatgaactcaatgatctgtagacatttttgccagctatatgaatgtggctgagcctcatcatcatgcaaatctgagtatagatgaggtgttaaaatagaaaccaaagcttaatcctccaccttttccttgcctgcctctaggcaactcagcatggttggaggaaaacacatacaccaaggtgactgactgatctggtcatgagcactggcctcatgtatacctctcactgcctgccagtcctactgtatttctacttagttccctttcctccatgaatatgtcctatttttgtcatctcctgcaaacctccagcaattcttctgctaactgatggccttccttttttatgttactgagaaaatagaaacaatcagaagagcatttccacatgctcctactgcagatttgccaagctccttgcatcagtacccacatccatctgcctttgagatgaatgaacttgctagcccttcacatggggtctggtctccccaataattatgtatccagctgtctacttgacatttccacttgtactgcttgagcatgtccaaaaaggaactcttgctttcccttccctaccataacaataacattgaactgctcttcctgtaatctgccttgtcctggtaaatgacaggttacaccatctggtttttcaggtcacagcctcatgccccaaatgtaatccatcagaaaatcctgtttttcctttaaaatatattagaatatgaccacttttctatttttccagttcactgcattagctttcaaagtagtctccttgtttttgcccttgtttcacctagtcttaatgtaatagcccgagtaattgttaaaatgttcagacacatcccagcactcgtctgctcaacacttcctagactgaagtctttatgtgacctaaaagctcctgcgtgatctgtgcttcccatcgtccacctgattctgacatctgcagccattctccctctccttcatgccactgcagccacactggcctccttgagctctgtgaaaaacgcttttgctatagggtctttgtacttgttattccctcttccaggaacattcttttctcagataccagcaatctcttcatcaggttgttgctcaaaaatgaccttagctaagcggtctcccttagccaacttctctaaaatagcagtccctcataccttgtcaatttgttcctaactgtactttattttaattctaagttattggcacttgacacacccatgtacatacattttaatatatatttaaatttttttgttgattcatatttatacgtacagaagagtacacattgtaagtctacagttcgcatgaattttcacaaactctacaagcacaagaaatattaccagtgctgcagaagtccccctgagttccctttcagttactaaccccctccctgccgctgtggctagccactagcctgacctctaacaacatagatgaatttttttttgtatcttgtgtaaaagacattcagtgtatactcttgtgtctagctccttttgttgcacgttacttttgtgaggtttatccatttcattgtgtattttataggtcatttattttcattggtgtgttataagtttaattttcatttaataatttatatattttaattttgtactatataattagttaattgcccatcttccgactagattttttttttttgagacggagtttcgcttttgttgcccaggctggagtgcagtggtgcgatcttggttcaccgcaacctccgccttccagtttcaagcgattctcctgcctcagcctcccaagtagctgggactacagacacgcgccaccacgcccagctaatttttgtatttttagtagagacggggtttcaccatgttggccaggatggtctcgatctcttgacctcgtgatccgcccgcctcggcctcccaaagtgttgggattacaggcatgagtcaccgtgcccagcctagaatgttaatctcataagaatggggattttgctttgctttgtttactgctgtctcttgttacataaaggtgtaatttttaaactaatttcccccacttgacatgtaagcaataatgtcttatttcattttcagtctccagcatccaaaacagtgcttgggacacaataggtgttcaaaattgtgctgacagggaagaatagatggataaaaaattattttcacctttttccctataaaagattattttgtatttgtgttaaatataaaaaataaagtatgtaaaacatgaaagttttcatgcaggagttggcaaaagacaggtcacagctggcaagctaggaatgatttttatttttttaaatttatttcattttaatttatgttatttttggagacaaagtctcactgtatcccccaggctggagtgcagtggcgcaatcttggctcactgcaacctcagcctcccgggttcaagcgattctcctgcctcagcctcccgagtagctgggactacaggtgtgcaccaccacgcctggctaatttttgtgtttttagtagacacgaggtttcgccatgttggccaggctggcctctatctcctgacttcaagtaatccacccgcctcagcctcccaaagtgctggaattacaggcgtgagcaactgcgcctggcaagctcggaatgatttttagatttttaaaaggttttagaaacgaaggatatatgacagagactgatgtggcctgcaaaacctaaaatatttgtctggtccttcacaaaaaagctctcagaaaatcactataaagttaactctatgtaattgttacataggaaggtagactatttccagcagctggaaacctacatgctgttccctgatcacaactcccactaccctagaagtgatcacttggctggtttttgtggtaatcatttttgttttcgtgtagtttaaactatccatgtctgaatccataaacaaaatagttcagttttgccagtaggtaaactcagtgtttaaatcttaggtatttttatttttggctgttctatcaattattaagagcggtgtgtatatttgtatctctcgctgtgattgtggaagttgtctgtttcttcttacatttatattaaattttgttttatgtattatgactctcttcatctctttaaagctctttgctttattttttaattttaatttttatttttgagacaggttcttgctctgttgcccaggctggagttcagtgcacgatcttggctcactacaacctccgcctcctgggttcaagtgattcttgtgcctcagcctcccaaatacctgggattacaggcatgcatcaccatgccgagataatctttttgtatttttagttgggttttctccatgttggccaggctggtctggaactcctggtctcaagtgatctgcctgccttggcctcccaaagtattgggattataggcatgagcccctgagcctggctgaagccctttgctttaaatgtggtttatctgatatttaatatatccaaatcattgtgaggtataactatttccattcttaatactgtcaaatttgcattatgttttctatcttgggcaaataccatataattagatttttttctcttaagtctaaaattttttattatcctatttacattcaatataattaccaccacattcagtttagatatatcattgtttaatgtgttttttatttatcttgcctgttctgtgttcctttttctttaatttcttgcttccatttagattggattttttttttaagtcattttctgttttcctcctctgctagtagctaggctgtctttggtgtttctcttagaaagtaccacataccgccgggcgtggtggttcacgcctgtaatcctagcactttgggagacctggggacccacgtgggaggattactcgagctcaggagttcgagaccagcctaagcaatatagtgagatccctgtctgtacgaggcaggcaaatcatgaggtcaggagttcgagaccagcctggccaatgtggtgaaaccctgtctctactaaaaatacaaaaacttagctgggcttggtggcaggtgcctgtaatccctgccactcaggaggctgaggcaggagaatctcttgaacccgggaggcagaggttgcagtgaaccgagatcacaccactgcactctagcctgggtgacagtgcaagactgtctcagaaacaaacaaacaaacaaacaaacaaaaaacaacatttaaaaattagccaggcatggtggcatgcaccttgtagtcccagctactcaggtggctgaggtgagaggattcctcgagcctaggaggttgaggctggagcgagccatgatcacaccactgcgctccatcctgtagcatagagtgagaccctgtctcaaaacccccagaaaagaaaaaataagaataaattaccacatgccaaaatttgaagtcagttgtatcttcatcctctaccaaataaaataatgtccccagaacactgtttactctgctactgatttggtggtagtggtgtatgtttttattttgcctttttttggtctcataaaatattactgttcagtgctatcagtgttcgtttaggtttatctatgtatttacctctttgtacttctttcctttttgcatcctacaccttccacctggggttgctttccttctgcctaagtattcctttagtattcttctagaatatatctgctagagattaactctctaggtttttgtttactgaaataactttattttgctcttattcctgaaaggtatttttggctgtgtatatttttaggttcgctttctttttttttcttttaacacaattgagcagtaattcattaccatgttctaaccctccattgttactattaagaaatcagctgtcatttgcctgttgtttctttgaaggtatctgctttttttcccctggctgctttaaaagtctttagctatggtgttctgtagttttatgatgatgtgtcatttcatttctcttgcttgtgatttcttggacttctggaatttgtgggttggtatctttcatccgttctgaataattagccattgtctctttgaatattatctctgacttgttcttttttccttctcttatgaaattctaattaaccatacattatactttctaattttattaccatggcttttgactttttttgtatttttgttcttcttgtctttatatactccatcatggataatttcttcttgcctttcagttcccagatcctgttttattgtttctaatttgctattagctctattgaattggttactgccttttgaagaaaaagaattacatttcctgcagatattttcaagcctgtcttttattttttaaaatatggtagacacaattattttataatctgtttgataattctagcatctgaagcttttatgaatctgtttctggtgtcccttgtttttcttagttgttgttcatggctttatttcttttatgctttgttttttaactgtgtactcctcattgttcttgaaaaattttttggggggtttcttcaagatctaggatgaatgaagatgtgttaattcagggaaaatttttatttgctccttccgagtacctagagattttacctcttttatataccactttagtgaatttatggcttatattttgtttagtttattttgtttgcttatttcaactgctaggaaatattgatttggattgtgtcaacatttctcaagacaacccccaactcttacactgccaaggcaacttcctggcagccatctgagggtgggggtaatttttcttttggtttaccctttccttgagaatgtaggtagctctttggaggcccagcttgaagtgggaagggtttcctattgaaccctctcccttgggtgggctttggtctgtgactatctgcttgataccatgttgccctgaaaatggaaattcaagatctgcaagtgcccttaggccatatgtggctttggtacttcttttacctgtcttatgttcctaatttcccttagattttgctctggcagatccctaatactttatcaactcttcagtgcttttaatgtttttttgttgttgttgttgttgttgttcgcccatattttatcctatctgtatagtttttttccccccccagggagacgttggttcaaacaggaaaggctgtagcctacatagtgtatttacagaaatgtttttaaatctttcaatccttggcaggtatttattgaatatatggcagaaggtttaattttactgttgcagctcgttctcccatgcagtgagaatgttgtcatcaatgggtatcacaggtgttctggagcctgggtttaaactgttacatttgctggggtaggactctactcatagattcaaaaactaatttctttgtcaggatcattttacttttattttttttgacatgaaaacgttaaagaactattcctgattaaggaaaattatttcctttattcatgcagattatgaaagttcaacaattcagaaatggtgaaatagaaagttccctccaaaagaactgttattagagagtatggtgggcaaatatttctagactttttgagatatacatgtatgtttatataataggttttcttatttccattgtattagtttatttaaccagtatcttgtaagcatttatatctataaatagtgctgcaatgaacatccttatacatacttattaacttacgcatttttcctagataaatcccctaatagtaattcccaggtcagaatatgatcatttaaaaatgtcatcacataaattgctagaaggttattagcagtttgagagtaccaattttttcacaccctgctaataatactgaattttatcattgtaacctttggcataaagaaaaataccttgttttaacttgcatttgttcattagttatgtatattaaacatcatatgtttaatggccttttggatttctcttttaatgcttgttcaggtcctttgcatatgtctcttttgaaatacttgtgtgttttggtttttgttttactgataggtaaagcattatttattaagatttaataaattatttatattattaatttgttatattgtaaatatttttgcttgtttgtaatcttgtcttttaactttatgttgacttttaccattcagatgcaaaaaaattgaagtagttaaatttatcagtgtttttcctttatgacttatgggatttgtcttattcttagatgttcccatatggtgtattcctatacggggtgtgtgtgtgtgtgtgtgtgtgtctgtgtgtgtgtgtgtaattttttttttttttgagacagggtcttgctgtgtagcccagtgtgtgtgtgtctgtgtgtgtgtgtgtaatttttttttttttttgagacagggtcttgctgtgtagcccaggctggagtgcagtggtgtgatcttggttcactgcagcctctgcctcccgcgttcaagtgattctcatgcctcagcttcccgagtagctgggactacaggcatgtgccaccatgcccagctaatttttgtatttttagtagaggcagggttttgccacgttggccaggctggtctcaaactcctgacctcaagtgatttgcccatcgcggcctcccaaagtgctgggattacaggcatgagccactgtgccccgcccatggtttatatttttaatgtcatgtttaaaaagtcctttaccactagaaaattctaaaagcatttgtttattttttcttcttgtaattttttatatatgataaaaggtaggaatcttcttttccctttttttctaatatctgcacaaacgtcctaccatctttttaataagttcccgctaatatgaaatgcacattaatcacaacttatatatctatattatatagatctgtttctgaattctgtattctgtgccactggtcaatctgtctgcttctgtatctgtatgatactgttttagttaatgtaacattgtagtatgtttcactatccggtcaagtttccctgatactttttctcaaaaattatgtggctgattatgattatttttttaagtgaaccttagaatttattgtgaaattctacaaaaacaactgcccaagaaagcatgagagagaacctagatgaccactataccaccataagactaccccttggaagagaaaaaggccaaacacaaaatttaaaacattaaacttgggttttagagaaatttgatgtttgtagaatctgaacccaggaacatgatattaccgtttaacttagatcatcttttatattcatctgtgaagctgtatagtttttcttcaaaggtgttctgcatgtttcttaagtttgctttcaagtattttacagatttttgtttgctactttgaatctgcttttccttctgttacatgctctgattaaaatcagttggggaagctatcaattttagtgtatttattttgtatttggccatcttactgagctccttttaattgttatagtaatttttccattgatttgcttggtttcctttgtgaatggttatatcatccaaaaatgacactaaaaatctttaatttctaatatttttacttcatttttttcttttttacattggctaaaactttcataataacgtttaatatgagaatgtgttacttttgtcttgttttctagctttaattgaaagggtctccagtcttagcaccattaattatgatattttaatttttgaaaaacatactcttcattgcattaaaagtggataattccagtcttttttttttttttttttttttttggagatagagtcgctctctgttacccaggctggagtgcagtggcgcaatctgggctcactgcaacttccgcctcctgggtttaagcaattcttctgccttagcctcccgagtatcttggattacaggtgcccacgaccacgcctggataatttttgtatttttaatagagatgggtttcaccacgttggccaggctggtcttgaactcctgacttcaagtgatccgcctgccttggcctcccaaagtactgggattacaggcatgagccattgtgccttgccaattccagtcttttaagagttgcctaacagtgtgtgtatcctttttggtatccaacaggaagaatcttaatttatccctccctaaagttaatgtaatgaattacattagtagatttgctaatgttgaatcatttttaggtttctggagtgagttatgcgtaattgtgatgtattatccttttagtatactgtggaacttgttttgcttgcatttattttagatttttgcatctaaatatagtacagcaagaacagaattgagagtgaaataagcttcacctataaagtcacgtgacaggccaggcacggtggctcatgcctgtaatcccagcactttgggaggctgaggcgggcagatcacctgaggtcaggagttcgagaccagcctggccaacatggtgaaaccccgtctctactaaaaatacaaaaaaattagccaggcgtggtggcaggcacctgtaatcccagctacttgggaggctgagacaggagaatcgcttgaacccaggagacagaggttgcatgcagtgagagcagagactctccattgcactccagcctgggcaacaagaatgaaactccatctcaaaaaaaaaagaaaaaagaaaaaagaaaaaaaagtcatgggacaatgtcttaattttcatttacctacaggatagaaataatatttcctgtgtagggttgagggcattatgaagttgatttgtagaattctacaaagtaacatgtaaattcagactctcataaatatagaaccattaaaatataatgtcaaagaatttgagtaagatagtcacatttttagataggttataatacaatgataatgttggtatgctctccataattatttttagagaggcctttttaaataaaccattcatcttatatttgataactgtttttaacccgttgcatgtttgggcagtatcagattatctttctcatgtcatttgtgtgtttctttactgttttccagcgacgagtagaacagcccctctatggtttagatggcagtgctgcaaaggaggcaacggaggagcagtctgctctgccaaccctcatgtcagtgatgctagcaaaacctcggcttgacacagagcagctggcgcaaaggggagctggcctctgcttcacttttgtttcagtgagtacaaagcctaagttaattcatatcctttccattgccctagtgctccttgatgaggttggattaattattttgatagagagatagggacatttctaatacttttttttaaaatgtgatctccccttatcatcattcccaaacatgtctaattctacatcacttctaaatatattgtgtttttcccagtctcccttggttcaagctcctgagggagactgctttgtcaaagcctgaacccacaatgggaaggaaggaaagcataatcttagattgacaaagaagaaaatacagatcaaattccattagtaaccaagatataattaaaaatagagtctccgagttccagccatcatctatgtaagttaatactcaagtcagtacagttttagtatgtaggcaggcattctcacagcaagttactggtcatttaccccgtgtagtatttgggctatgtacacacttgctttctcaccccttcagagtgttggtacacttaacctttctcaggaatatttggctacctgttcgctcctttcagcttacttctttctctatctttgaagaacaagaatttgagtattatgaaagtttgacctcatttcataaggcgctatgagtgcaatttgaaccaaatgttacttttcctggtttttgggccctgccaggtcacctgtttgttgccaagggtgccagagtaacagaaagccccgtcgccgtattcctattccactttcaggggcatctttcacaactaagtcaccactcatccagattttgtccctcttactggttcattttgtccagttataatttaagtttcctgtttatttatcctgtggtgtctataagtctccaatccacactccaccaactgtgttcaaaaaggtgctgaaaatggtggttgtcttaaggaaaggaaatagaaataataaaacagttaaccagataggaaactattgtgcatgatatggaatgttttcttatagttatgatagctttaccttaagaaagagatacaacgctccttgaataacgtcatttcattcaacatggtttcgtgatagtgttaattagacactgtgagctgacgccactgtctgtgtggagtttgcgtgttttctccatgtctgtgtgggttttcttagggcactctggtttcctcctgtatcccagagatgtgtgcattaggttcactggtgtgtctacggagtcccagtctgagtgagtgtaggtgtgtgtgtgcaacagaatggcttcctgtccaggtctggtttctgcttgcaccctgagctgcctgggataggctctggcttttcaccactctgtactggaataaacagataaatcattatcttacttgtttttattaatcttacttaaatgtatgtagagctcacttttatttcagtgtttaatgttagaagtgttttgatctttaatcatcaaaggaatggggaaacttcttgtgtgaagacagtatatcctatccccaggtaacaaaggaaatatacatactttaaaaatgggagaattgacctatataatattgtgagagggactgacagcagtatggaatagttcctttgagaatgcagtatgctatagtattgttctaaagaatgtatgtgtgtcattcacacatttcgagattgttaatgtttatcatacacttacttttgttaaatctttgttttttttttttttttttttgagatggagtctggttctgtcgcccagtctggagtgcagtggcctgatcttggctcactgcaagctctgcctctcgggttcacgccattctcctgcctcagcctcccgagtagctgggactacaggcacccgccaccacgcctggctaattttttgtatttttattagagatggggtttcaccatgttagccaggatggtctcgatctcctgacctcgtgatccgcccgcctcagcctcccaaagtgctgggattacaggcatgagccaccgcgcctggcctttgttaaatctttatcttggatcttacttttccagaaaaaaccttggataattagggagttatttgtcttttggtcatttttaaggcattaaaatgacctctttttcacttgagaggaattctgtttgtttactccacaaatacgtactgagtgcccactgtgtaatgagcatagttaaatacacaagatttggtcagcaagaacttgttcccctttccatcttctgtaaaaagtatggtatgtaggcttgtggtggatgcacgtgaaggaccacctacttagtcctatcagctgacgcactccgttatcagaggagtagcagatgctatagccgtgttgttctcatgtggaaagaggtggcagagactagtaacaaaatgatcatgtatgaagaaggaacatggaaacagtatgaaaaccaaaagtctaaatgctctggtacagttttgtttctctttgcttctcagcagtaccagccagcatataagcttagtagtataaggaaagaaaatagtaaaagggttagtattaatatacaagtgtaaatcagcaaaggaaagcagattcttagaaaagtaggcaaagactgtttttgaaaagaaggcaagtggctaataacatgaaataatgctcaattttggccatagagaagtgcaaaataaaacaagataacatttttgacctagcaaattggcaaggattaataagtttgatagttcttggtgtaggtgatagtttagagatatattcagttttattctgtctataaattgttgaagtcatgtggacaacttggtaatgtatctcaatgttaagtttacatatccttgggtccagaaattccattcccataaaattacacaaagatatttattgaggtattgtttattgttgcaaaaaatctggaagcagtttcccttccagtatttcagaggatatgaccttcgcatcagacctcatctgacgtaattcattagcaactattgatcacttctttcttctctaagcatacggtctttcactcggcttccactcttgatttttcctcacattctctatctctgaacattagagtgttccagggctctgtcttcagactcatttatctaccttcattttcttcttaacctccctctctttttttttttttttttttcaattgagacagggtctcactctgttgcccaggctggagtgcagtggtgcaatctcagctcactccaacctccatctcctgggctcaagcgatttccccacctcagcctcccaagtagctgggagtacaggcgttggctaccacgcctggctgatttttgtttttagtagagacagagtattgccatgttggccaggcaacatggtcaactcctgacctctatggtctcaaactcctgacctcaagtgatcctcccgcctcggcctccccaaagttctgggattacagacgggagccaccacacccagccttcttaatctcatctagttcctttgttactaaaatttaactcctatgtgcagaggacttccaagtttatgcgtctagccagggctctgccctgaatttcaggcctgtgtcagttgcctccagtcatttcctttctatgtctaacaaacatgtcaaatgtaacatgttcaaaactgaactcttccttctgttccccacccgaaacccatttctcctacagctgcctttctcctcctcctcctcctcctcttcctcttcttctttctcctttcttctttcttcttctttctttcttttcttttttttttttttttttaatagagacagagtattagtgtgttacctaggctgttcttgaacacctgaactcaagtaatcctcccagtttggcctcccaaagtgctgggattttaggtgtgggccaccgtgcctgacttccacagccttctacatctcaataactgtcaacttttctccttctaattgttacagctaaaatccttggagtcattcttgtctttctcttctttttatattatatgccaaatccaaatctatcagtaaagcttattgattttaccttcaaaatatgttcagaatttttttttttttttttttttttgagacagagtcttgcgttgttacccaggctggagtgcaatctgggctcactgcaacttccacctcccaggttcaagccggttctcctgcctcagcctcccaagtaactgggattacaggcgcgtaccaccatacccagctgatttttgtatttttagtagagatagggtttcaccatgttggccaggctggtcttgaactcctaacctcaggtgatccacccgccttggcctcccaaagtgctgggattacaggcatgagccactgcatctggcctgtgttcagaattttaccacttctaattctcttcactactgccactccaacttaaaccattgtctcccactgagataactggacccattgctttgatctttgttttcttttaatctgttcttaacaaagcagagtgattgtgttgaaacgtaagtccagtcatgccactcccctgtcgaaaagtccttaaagtggccctgcatggtttgttttcctccaccctgacatgttttactaccatctacctttctcatcagattccatgcacgctagccaccttgttttctcaaatactctctctcagtgatgctctcacctcggggcctttgcgttggctgttgcctttgccctaacattcttcacccatatatcatcatgccctgctctctcagttccctctggtttctgcttatatttaccctattagagaggcctaccctggccacactataaaatagcaacttctccccacccatcccacctgttactgagctcctaggccctgcgttgtttttctccttagtctacaccagctgacgtactatgatggacttttgtctgacttccccccactggaatgtaagctccatcaggtcaaggactttgctttgttcacttgtgtatctctaatgcccagaacgggacctgctctaataggcactcagtgtaattatatgttgcatgagttagtaaaagcattctttatagaaggactggttaaatgaatcgtaatatatttgtacagtggaatgctatacagctggcaaaagaagtgaggtagctgtatatacaccaatgaaagatttctaaatatgtgttgataaaaatagcaggtggcagaatattaagaatttgatcttttaaatgtttaaaattattacataattctatgttttaacataggaaatttgaggttttatttttaagagagaggtctcgctatgttgcccaggctggggtacggtggctatttacaggtgcaatcatagcattatagcatactatagccttggaacttctgggttcaagcaattctcttgcctcagtttccagagtagctgcaactagagtgcaccacagtagctgcagctagagattgcaccactgcactccagcctgggtgacaaagtgagactcagtctcaaagaaaaaaaaaaattagtatttggactcacagtctagtgctcattctgtaccaccacactagctcccagtatgaagactatctgtttgtacaaagacaatatatatcaggctagagaataagatatctgagctgacctctcacttttaactttatggcattacaacatacataaagatccagtaagaagggagatgtagagggattagaaaaaggtcatttcctcttctattggtgagaatgttgtcagggaaaatcataagcaaatagtttcctaaattatgaaaatagaacatgcacatgacccgcaagaaattgaggagatggagaagcgtaaaattcttcccttggatttctcagagagataactactgttaacagtttgtgttttggattttctaaggattaccattttaatgtcaaataatgtgttccttatttaatcttatttatttattggtggagacagggtcccactgtgttgcctaggctggtcttgaaccatcctcctaccttggcctctcaaagtgtggggattagaggcttgagccactgtacctggccttatttaatcaactttaagtaagatctgtttactcctcgttatgaaagacaaatttaacataactttcacccagtctttctttctttttcagttgtttagttattgttacagtatgagtgtttgatatttagtttgttattttaactacaattgagtcttttctgctttgtaaattattctaagacttgaaaagaaggaacatttacaatattatgattgtttcattgtttggcattgcaaaaccaaatgattttattggactcactgaaaagaagagagacattgaattagtttagattgaaacagttctggttgtcaaggtctactggatctttttttcccttaatggcaagtctgttgtttccttaaaacttgtgtcttttaacattatgcagatgttcttcaaaacttgattttttaaaaaggtagtttgctttttttatgccaaagtattttaaaatacaattcagaaatcttgacctcctatctctaaatagttaaataggcatttttaaaaaacatgttaacattttgctagatagcgaaattagcattataacatgtctattagcatctataaaatagaactttcttatcatctgtgcctgttgctctacactgacatacatttctagaaagacaggctaaatgcttagttctttccttttaattactaatgaggcttttaaatttttttttaacttttaaagtagggagttgtttgatagctgtgacaaatagctttctctttgattatcatggcttcatggattttcatgggtgtacatcagtaaatagaatcgttcttttttggtgccagttggtcacggctttatccttttaccagtcgatggacatttaggttgtttccacttcttggctattatgaatgatgttgctatgaacattcatgtataagactttgtgtagacatacgttttcgtttcttttggatatatgctggagagtgaaattgccaggtcatatggtaactgtttttgaggaactgccagactcttccacagcagctgcaccattttacattccccgcagcagtacattccaatttctccatgtccttgccagtacttgctattgtctctctttttcattatagccatcctagtgggtgttaagtggcatctcattgtggttttgatttgcattccccaaaaaactggtgatgttgagcattttttcatttgctaattgggcttttgtgcatcttctttggagagatcactattcaaatcctttacccatttttaaattgtgttgcctttattgttaagttctaagcattctttatatattctgaatattagatctttgtcaactatatgattggcaaaggttttctattctgtgggtggtcagtttacttcttgacggtgtcctgtgaagtacagaagtttttaattttgagaaaagttcaatttatctgttttttttcttttgttgcttatgcttttagtgttgtagccaaggcttcacctaacctaaagtcaagaaaatttactcttatattttcttctatgtgttctatacttttagctcttatatttaggtcttttttccatcttgtgttaatttttgtgtgtggtatgaggaaggagttccaacttcattttttttgcatgtgtatatcctattgtcccagcaccatttgttgaaaatactgtgcttttaccattgaactgtcggcaccgttttcaaaaatgaactgacttacagcaagaggtttatttatggactctaaatctgctccatctatatctttgttatattagcccattctcacactgctacaaagaactacctgagactgggtaatttatgaagaaaagaggtttaattaactcatagttctgcaggcttaacaggaagcatgactgggaggcctcaggaagcttacagtcatgggagaaggtgaaggagaagcaagcaccttcttctcaggaaagagaatgagagagtgaaggggaaagtgccatgcacttttaaaccatcagatctcgtgagaactcactcactatcatgagaacagcaagggggaaatatgccctcgtgatccaatcagctcccaccagacccttcccctgacatatgaggagtacaattcaacatgagatttgggtggggacacagaaaaaaccataccacctgtctttatgccaggaccacactgtctgaataactgtagctttgtaataagtcttgaaattgggaagtgcaagccttccaactttgttgggtttcaagattgtattggctgtttgggatctgttgcatttccctgtgatttttaagatcatcctttcagtttctataaataaaccagataggatttgatagcaattgtgttgaatccgtagatcaatttgagaagtattgcctttttaacagtattaagtctttcaatccatgaacacaaaatatctatttaggaccctttgatttctttcaacaatgttttgcaacttgcaatatatagtcctatatttcttttgttaaaattattcctaagtatttattctttttacgctattgcaaatggaatagttttcttagttttattttcagattgctcattgctagagtatagaaatacaattgatttttgtatgttgatctgtcatgatggagtcttgctcttttgcctaggctgtagtgcagtggtgcgatctcagctcactgcaacctccgcctcccgggttcaagcgattctcctgcctcagcctcccgagtagctgggattataggtgcctgccactatgcccaactaatttttttgtatttttagtagagatggtttcaccatgttgaccaggctggtctcgaactcctgatcttgtgattcactcacctcagcttcctaaagtgctgggattgttttaaaggtttaagcaagttttaaaacgttaattgtaaagaaaattctgtgtgtaaacatattagctaaagttaaaaaggtatcatccagtttttctgggacatccttgtctttcttgttcatgatttttaagggaaaatatgaggtctttaaaaataaatattacattagccaggcatggtggtgtgcacctgtaatcccagttatttgggaggctgaggcaggggaattgcttgaacccaggagacggaggttgcagtgagctgagattgtgccattgcgctccagcctggatgacagaacgagagactgtctcaaaaaaaagagaaaaagtatcatgtttactgtatgtttttcagaggtggtcattttttaggttaacaaagttcctcttgttgttgttgttgttgttgtttaaagacagggtctcattttgtcacccaggctgttggagtgcagtggcctaattgtggctcactacagcctcaactgcttgggctcaagccatcctcccacctcagcctccccaaatagctgggactacaggtgtgtgccaccacgcccggctgattttttgtttgtttgtttgtttgtttgttgagcaaagtcttcctttgccactgaggctggagtgcagtggcatggatgtcagttcagtgcaacctctgcttcccagattcaagcaattctcctgcctcagccttctgagtagctaggattacaggctcacaccactgtgcctggctaatttttgtatctttagtagagacagagtttcaccatgttggccaggctggtcttgaactcctgacctcaagtgatctgcccgccttggcctcccagaatgctgggattacagtcatgagccaccacaccatgtcctaatttcttttgtagagacagggttttgctatgttggccagggtggtctggaactcctgagctcaagctatcagctcgctttggcttcccaaagtactgcgattataggcgtgagccactgcacccggctgagaaagttccctattttgagtttgttgattgttttttttttttttttacataatgaaaagggttttttatttcagagaaattttgttttactgtttctttgattatttcatttcctctgttcttttctctagaaagccattagatagtttcagggtctctgtgctattcatgtttcttttcttttgtgctccatttaaccttttgttttatcttctgggagattttcttattttctttttctttctttttttttttttttgagactgagtctcaccatgtcacccaggctggagtgcggtggcgtgatcttggctcactgcaacctctgccacccaggttcaagcgattcttctgcctcagcctcccgagtaattgggactataggcacataccaccacacccagctaatttttaaaaatatttttagtagagacggggtttcaccatgttggccaggctggtctcgaactcctgacctcaggtgatccacctgtctcggcctcccaaagtgctgggattacaggcatgagacaccgcacccggcctcttctgggagattttcttgacattgtcttttaggttactggctgtgtattcagctgtgtccattttgatatttaacccacctattaaatttttaaactttgataatcttattttgtcaatttgattattcatgttctttacttttttaatttttgtagctacagtatacttttgatcctctctgaacctattttatttttttcatcttaagaacctttaatacagttatctaaatgcagagtttcagtttatgaaatgaaccaaagcagtttgtcatttcatactataaactattgaaaatcaagtgctaaactgatactttacttttaaagttgtttattgaattatcttttaactcttatgattaggtattgttttttcgtcttggatttttccttttgtgctgttggggttgtcttgaaaatgtatttagcttagtggaatgagggattagagtgattaggtgttggcatggattttttttttttttctttttggtaacatagtctctttgttttccagtttggcatttctagattttaacacaggaccaggcacagagggtcacatttaatgttgaatgaatgatcagttacagcatttttttctctaacggatctgagcattgtcacatgagatccctatattgtgtagtaccttttaccttttgaaaacattgttttcattttcatgaggattttctgcttcccaactgaggaatttcctaactgccaacgtcctcagttaacttttgcatttttacttatcaatgagctatttatatgtgtatttttacagaaagctttaatttggaaacatctaacacccttagtttgctggaagacaacttagagtcagaaataagcatatttaaacccatataccatatatcaagaaatctgtaaagggcctttggatccctcttctatgggatctggcaacacagagccattcctacaactcccaaaagcagatctctatccagcacagacagacccgggtaggctgatgatcaataaccaatggaggggtgtatttgctgcataggaataaatggtaaccttagatagtctatgattcccctttgtcttctctatttctctgttggtatctgattgtttgtattatattcagaacttgcattatgggtaattaaagtcctttggaatgtgctttaagtttttgaggcttttctttacccttctagtgtattggagcagaaatgcttatactgcagcatggtgttaaggaaagtgcgcacactgttttttgtttacggtattccacggaagttaagtgctcacactttgaacttcctaactgcctacttcctcagtttacttttgcattttacttatcattgggccatatatatatatatgtgtgtgtgtgtgtgtgtgtgtgtgtgtgtgtgtcttttttatttttattttttttttgagctggagtctcactctgtcacccaggctggagtgcagtggtacgatctcgactcactgcatcctctgcctcccaggttcaagcgattctcctgcctcagcctcccaagtagctgggactacaggcacgcaccaccacacctggctaattttttatatttttagtagagacgaggtttcaccatattggccaggctggtcttgaactcctgacctcatgatctgcctgtcttggcctcccaaagtgacaggattacaggcatgagccactgcacccggccctatgtgagctttaatttagaaatatctcactacatcactttctaacaccctcagtttgctggaagaaaacttagaatcagatataagcatatttaaaccaatataccatatatctagaaatctgtagaagtgtcttttaatcatttgattcttttttttattttttattttttgagacagagtcttgatgtgtcgcccaggctggagtgcggtggcatgatctcggctcactgcaacctccacctcctgggttaaagcagttctcctgcctcagcctcctgagtagctgggattataggcacccgcccccacgcccagattatttttttttgtatgtttagtagagacagggtttcaccatgttggccaggctggtcttgaactcctgacctcatgatccacccacctcagcctcccaaagtgctgggattacaggtgtgagccactgcacccagtctaatcatttgattcttattggctcttattataaatatagttcagacagtcatttgtatagaaacacattgtagggccgggcgcggtggctcacacctgtaatcccagcactttgggaggccgaggtggggggatcatgaggtcaggagatcgaaaccatcctggctaacctggtgaaaacaccgtctgtactaaaaaaaaaatacaaaaaattacccgggagtggtggcgggtgcctgtagtcccagctactcgggaggctgagtcaggagaacggcgtgaacctgggaggcagagcttgcagtgagacgagatcgtgccactacactccagcctaagtgacagagcaagactccatctcaaaaaaaaaaaaaaaaaaaaaaaaaaaaaaaaaaaaaaatagaaacacattgtaaaaggagaggattgtaaaagcaatcaaatgataactgaaggaaatcttcagttatacaaatgcttgtatcctagtgcattataatacttgaggttcataatgatgacccttaattagtaaggaaagattggatttgctgcatcctagagtagagaacatatttagttatttggaattatatagacttggtgctcccccccaagacccccaccgcaagacggagtcttgctctgtcacccaggctagagtgcagtggtgtgatctcagctcatcgcaacctccacctcccgggctcaagcaattctcatgccccagcctcctgagtagctgggattacaggcgcccaccaccacgcctggctaattttttttgttttgtattgtttttttttttttttagtagagatgagatttcaccatgttggccaggctggtcttcaacttctgatcttagctgatccacctgcctcagcctcccaaagtgctgggattatacgcctgagccaccgcacccagcctcaaatcataaacttttttttgttttttgagacgaagtctcactctgttgcccaggctggagtgaagtgacacaatcttggctcactgcaagctccgcctcccaggttcaagcgattctcctgcctcagcctccccagtagctgggattacaggtgtgcgccactgcgcctggctaattttttgtatttccagtagagatggggtttcaccatgttggccaggctggtcttgaattcctgacctcaggtcatccacccacctcggcctcccaaagtgctgggattacagacatgagccactgtgctcagcctcaaatcataaactttttaaaggtttatccctgaccctctaaattaggttatgtgccttgttatatgctcttttagcacttatcctaattgtgattgtgtatttattatatgattgtttattcaacagtttctttcaacaaatatttaccaagtgtttagtaaatcttgttttggattgtaagcttcattaaggcagagtaaggactgggtctgtggtttctcttaccatgtgtacctagcacctagcacagtgcttagacatagggagtacttaataaatagtcattgaatgtatacattaaaatggcgttaataatgctgcctatctgatgaggctgttgtgagccttcaatgaaatcgtgtgtaggaagtgctagtttgctcacaggctggtggtaacagtctactgtggtcattgagagcagttattgtggacacaacccccagttctggtcaccccacccactagctctgtgaactcacataggtacttaatatctctgatttttattttatttatttgtaaaatggaactaataattacaaccaccttataggacagagtcttgctctgtcacccaggctggagtgcagtggtgtgatctcatctcactgcaacctccgcctcccaggctcaagcaattctcctgcctcagcctcctgagtagctgggattacaggtgtgcaccactgtgcctagctaatttttgtatttttagtaagatagggttttgccatgttggccaggctggtctcgagcttctgtcctcaagtgatccacctgattcagcctcccaaagtgctaggattacaggtgagccacctgacccagtctccttataggattttgtaagaattaacctgtgacaatgacagtgaaacatttaggttacagtaacttgttcaatagttggtggttataccattgttaatatgttaatgagtaagaacagtaatcaaaagaatatgtagaaagtatcagaagaaattcacatgtggaaatgctgtattctctgatgagatagtagtactgtatttttaccattccatgattctcagaatattgaatattttctacttatgtctgtgatgggtcatactttgttagctgcagttttaccttgttttaaaaagtactgttaggctaggtgtggtggctcacgcctgtaatcccagcactttgggaggctgaggcgggcggatcatgaggtcaggagatcaagaccatcctggctaacacagtgaaaccctgtctccactaaacatacaaaaaattagccaggcatggtggcgggtgcctgtagtcccagctactcgggaggctgaggcaggagaatggcatgaacccgggaggcagagcttgcagtgagcccagatcgtgctactgtactccagcctgggtgacagagcaagactacatctcaaaagaaaaaaaaaaaaaagtattattgagaatataatataattaacctgaataggttaattatattgtggaacctaaaccgtataaatttaaaatgccttagaatgcccagtcagcaagtgacagtattagaaatcaacctggattttagaccgctgtgtgttcatggataatgtttgtgtgtttaggagactattctgaatagtggttcacagtcctttacatgcatcccctgtgcattggatgcttcactagccttttctgactaaagcatatgaaaatacaagtgaaaaaggcaagttattacaggaataacttttcattttctctaattttcatattttaaaaattcatttgtaagcatttgatactttaaacctgtttacaggaacttggtataaaccaccatgtccagccctttgtctcatatttgaattgttttactttcttcttggccacgtggccctgacttctcactttcataagaaggggtttgtattgtggagatacaaattatggagttgtttgcattaatacaagtgtttgtggaaaaagatgccaaactttcctgtgattggtaatgcacctttattgtaggctcagcaaaacagtccctcatctacgggatctggcaacacagagcattcctgcagctcccaaaaacagatctccatccagcacagacagacccaggtaggttggtgatcgataatcaattgaggggcatacctgctgtgtaggaataagggctaacctgtgtagtctgtcattcttctctgacttctctgtatttctctgaccacctcattatttgtgtgtattatattcataacttgcattatgggtatttaaagtcctttggaaggtgctttaactttttgaggcttttctttactcttccggtgtattgtagcagaaatgcttatgctaaagcatggtgttaaggaaactgcacaccttttttttttttttttccctacagtattccacagaagaaaagtacctacgctttgaaggcctctaagttcagattctggcctgggcctcagtttttcttagtacaaatcatctgtgaaaatatggttgattctcatgatctcagacagtgtatacaaaatgtttattagtagtgtacttgtagtaggctttcaataaatgttaattctctaatttatgaaagtagttaatgtattccttttcctgcttacttatttatacctggctaaacttctctcagatgtgagataccaacatggtttactccttaaattgtgttcagaaactctttaatttaggtagtgttctgaacatttgaggattgtatctgcaaaggatggtggctatagcttccattttgtagttttgagtatactgggttttcttgaaggctcttttgatactatatatattaccttcaagacaggatcgttggcaatctaggagaatttcttaaatctcaagaggtatacaactccctggagcacatttgaattttatctaaatcaccagctcttgtacagttcagttagatagttgagcactcaggtagcttcttctcttcccttctgattgctctctgtttccaccagatggcgcatttgttccttagagagttgtgtgtcaagtctcctgtgagatccttttctattcaaagttagtttcatttctggagtaacgtgtttctacattgttcagtgcacagtagtgagaattcatacatttgattccagaattaacatgtgtttgaagtgtaggtgtagtgggacataaggaacccagcagaggacttgaagaatgagatgagacaagcagatttcatttcttaagccatgtgattctaggccatttgtgtgagcaagtgctttttcccacccccccgagaaaggtaatgagaagagtgtgatgacatataacatgttgagactaatcctaaatttgttttacctttgtctctgtagtccgacctcacaatagaaaaaatatctgcactagaaaacagtaagaattctgacttagagaagaaggagggaagaatagatgatttattaagagtaagtattaaaatgtaagagattttatagcaagcaccatttgttatatatatttggattatgtacatatcatagaagtaattactatagccaaataacaatgaaataataaacatttgggtatttttctttaattgagggaatctgagtaggaaccaggttcctgcattctaaacactacctttaaattggaaatcttatactgtagtgttttaatgattgaatttatattggagaaatagatatgtggagtgttatatttcatctagaactgtgggaataagtataaagtgttgttttcccattccagagaagttattttaatattgttgaattttataagctatttcaaaggacttattagcccattttgctttttgtaccttttataacctactcacccaaacttttttgtgcttacaaaagaaacctttaaaatgcttcatctggaattaaatagataccactagaaaatatcaatatattttgaatatgcaatttggcatgactgactcatagtttttaaagagtaaaaagggccggacatggtggttcacacctgtaatcccagcactttgggaggccaaggcaggtggatcacttgaggtcaggagtttgggaccaccctggccaacatggtaaaaagaaaccctgtctctactaaaaaaatataaaacgttatcctggtgtggtggcaagcggctgtagtctagctacttgggaggctgagacaggagaattgattgagcctgggaggcggaggttgcagtgagctgagattgcgccactgcattccagcctgggcgacagagtgatactttgtctcaagaaaaaaataagaaagtaaaaaggaccgggcatggtggcccatacctgccactttgggaggctgaggcaggaggattgcttgagatcaggggtttgagaccagcatgcatgacacagcaagaccccatttctataaaagaatacaaaatttgccaggcatggtggtgtgtctgtggtcccagctactgggagcgtgaggtgggaagatgcttgagcccaggacctctaggctacagtgagccaagttcacgctgctgtgctccagcatggacaacagagcaagaccctgcctcaaaaaaaaaaaaaaattatacatgctctttacaaaatacagaaaaatgtgtcactcataattccattaattgggattaaacatttggtacattttttttttcagtaattttgagctgtttgaagtagatatgtgtgtgtatatatacacacacacacacacaaatgaatatatacataaatgttactgatttatgaataacattggctagcatttttctctttagtgatttagaaggtataggtttaatccttatttgtgctaatgtggtagttaatctgactcttcagggtcctgaaacctccagggctactgtgacactgcaaggtggggatcggcagccttgcctttgtcagtctttcttactaggctttgggtacaattttgtttgaatatatgtttaataatacagattataaaagtcactgtactcatgatgatctgacttccaaaattgttttacttgtattatatttctgtacttaatgaaaacatagggtaaaatagtgtattttgactcctttttatataaaacctggaattcagcacatagctaaactaagtctggcctttattagtaaagtctggtgtgtttatattattattaatttttttttttttttttgagacagagtcttgctctgtcgcccaggctgaagtgcagtggcgtgatctcagctcactgcaacctccgcctcctggggtcaagcaattctcctacctcagcctcctgagtagctgggattacaggcgcccgccaccacgcccagctaatttttgtatagtagagacggggtttcaccatgttggtcaggctggtctcgaacccctgaccttgtgatccacccacctcggcctcccaaagtgctgggattacaggcgtgagccaccgcgcccggctattattattaattttatatatttattttgagacaggatctcactctgtcacccaggctggagtgcagtggcgcagtcttgcaagctgtgcgctccccagtccccgcctgatgtgatcctcccaccttggcctcccaagtagttgggactataggcatgtgccactacatttggctgtttatattattaattaattattaattttttgagacagagtctcactttgtcacccaggttcaagtgattctcctgcctctgcctcccaagtagctgggattacaggcatgccccacaatgcctggctaatttttgtatttttaatagagatgggtttttgccacattggccacactggtctcgaactcctgacctgcagtgatcagcctgccttggtctgccaaagtgctgggattacaggcgtgagtcactgcgctcggcctatattattattgttaaattaccattcttactgctatatatgatactaagttcttatgtatagagtataggcagaggcagctttatgaccaaatttgtagtcattgttagacttgtttattcaactgatttcaaaacttatcagcagtattttttttatttatagtttttgttttatctgttgatggtggtacatttttaagtgattatttttcagcaaggatttgtcagtgttaaattttctctgccttaccgacctgagaattctctcttttgccctcccgtggaaagacaacactgtgtgcaggatttttgtgtcataaccccttgttctattcgttctgcctctcaaatataacacgcattctctctctctgtttctccttcagtttttcaagcatttcgtatttcagagaggttcatgaccaaagcagcaaacaccataatttgttaaatattaccccagggtgtctctatatgtgggtttatatatttttatttggaaaatgtgtgattatgtctaactatgcttttatccctctttatattggtttcttcttgactcttagcttgaatctctgatttctctcctttatttctcacatgttatgtcttattttaatatgattgcccctttcttctgaatctcattaaacactgtcttccatatatttctggcatttactgcagctcgtgtgaattttgattttattgtttacatttttattttttgagacagtgtcttgctgttgcccaggctgggtgcagtggcaccgtcatggctcactgcagccttcatctcccaggctcaagcagtcctctcacttcagcctcctgaatagctgggactacaggcatgtgccactgtgcttggctaatttttttattttttgtaggaacagggtctcattatgttgtccaggctggtcttgaactcttgggctcaagcaaacctcctaccttggcctcccaaagtgctgggataacagacgtgagccaccgtgccaggcctattatttacattttaaatttccctgcttttttccctcatctaatatactttcttaccccatcttgtatattctctagggtttttggttcctatttcctagatatcacgtctttttgcattttatgaaatatgacaagaagtattctaaaatgttcttttgatttctatgggtgatcattttcattgttttcaagctgattttctgtattccttgggcctatttttgttgttgtttttatttactattgttatttttatttcctttcctccatctttgaatgaggagacccatatgtagtctcagcactgtgttgtatttttcattgttcggatatgtatacttgcatggagttgctcttattcctgtttttattcatctgggtgctggttgaattgccatcgaagatttataatgaaatggtttgtgggtgtaaaaagctccttgccaaattccagtatctgtcagggttttgtacagagaagctctgctgtactgaggaagaattgtgggcgtgcctttctccatcatctgactctttaagattgagatgacagagtatgagaaaaacttgaatcctaacttggtactgctttaggagtttcaaaaaaatgtttgcttatgttttctaataagcaatatgtttccttcactcactactgtcccttctactccgtcgtcttcagactgttgcagtctttatttgtatgtagagcagtactaaaggagtagataaataaaaaaggaagacacagagggcagctgccttgtttttaggttgattagaacttgtgcttctagaagatctagaggatcgacagtgagggaaagactacatgtcttgtatattctttcagacgtcattcattgaattttgccattttaataagatgttgggtatggctgcattgggagctactagccagctgctttttttttttcttttttttaattaaaaaaaaaggacacagtgtcttgctctgtctcccaggctggagtgctgtggtgcaatcacagctcactgcagcctcgacctcccaggctcaagcaatcctcagcctcccgaacagctggcatcagaggcgcatgccaccacacatggctaattttcaaaattttatagagactaaggttttgccatgttgccgaggctggtcttgaactcctgggcttaattgatgctcctgcctcggcctcccagagtgctgggattataggcatgagccacgctcaccagctgccagctgttactttaaacatgaactcctcgaagacattagtgtcagaagccacaaaaacttagaattattaaaattttaaataactgccaagaggttgatggatttcatacatttgattatagatttcaagggaacactcaccttatgagtagactgggttttccatatacattaaatgatctttgcttcgtagattctttactatgaatttggtaatcacacttacccaaatgtagttacactctgtctttgataatatggttctgtacaaaaactaacaggaagaaattatgctgatggggagaggagaaacatttggagacagaagctgtttctcatgggttactttaaaaatgatgctatattatacaaaagaaaaaatgataaaaatttttaatgaagctacaaggtctcaaaaattgagtatcgtgtgatatcttctgtttgtgccttttagtattttaggaacacataacaggtttttctttttcataatttaagtgagtttttatgaggtaacattatttgctagaagagctgagatcttttttttaacacaaaaggaataaattcaggacttgcaagtcaaattcgtccttgggttagtggttctttccttctctgttattgcaggaggctttaagtttttagtccacactgtaggcttctgaccacagctaaattagctgtatatttacattctggcattcttgaaccaggacgttgtttgtttgttctgtcttttgtgggcatgggcgtgcctggcttctctggtgaggaacatttatgcaaatttatctttcttaaatgcgactagaaaaagaacaaagcaaacataaaattcagtaatttttttgtatgtgcttaatcactctttgtattttaaacattcattgtagtttattttttttttattttttatttttttttttgagatgaagtcttactctgtcacctaggctggagtgcagtggcgtgatcttggctcactgcagtcttcgcctttgagttcaagcgattctcccgcctcagcctcccgagtagctggaattacaggctcccgcaaccatgtgtggctaatttttttatatttagtagagatggggtttgaccacgcaggccaggctggtcttgaactcctgacctcaagtcatctgcctgcctcggcctcccaaagtgctaggattgcacgcatgagccacgattcccagctttaacatttttttaattattattttgtgatagcttaggtgtttgtgattacaagagtagctgtaactggttattggcaggagcaaaatatgatcagtagaaaaacatgcccaaattagtaattcaatttatcatttacaaatagatgatatgttatgagagaataaaggaatgaattatttactttttctaagacatagttacttcttacctgtttgaactttaattttgcttttgataaaacaacatatagaaatgatttttttttctctccctagaaactgcttttccattaatcttcttccttggagctaattaaaaatttttttctcattgaaggccaactgtgatttgagacggcagattgatgaacagcaaaagatgctagagaaatacaaggaacgattaaatagatgtgtgacaatgagcaagaaactccttatagaaaaggttagtgaataatgttggtctaaactctgtatcccaagatactcaatgtgtgtcattgtgtggcttcttattccttacttgagatgaaaatatttaaaagtagagctttttaggaacatgatttgacaattagaattttttccttacatggacaccagaccaaccatccagagtgttaatttgggatatgctttgttgctgtgcattgctttgagtgtgatattgaacagagacagcttgtcctagttgagtttatttggggtattgctctcctatattcttatattcattctatcaattgaagtgagtatcctattactattagaatcattaacaatagttgcatttttgtttcagagatggcatttagaataacttatgtatataataatgtgataattaatgctttgtgcattaaaaaattaaagttgtcatatacctgcatatgattacttaattggctgatgtcctctttattatattcattggttaattatcacttatctctgttaataggtattagtaactattagaattttttttttttttttttgaggctgagtctcatccaggctggagtgcagtggcatgatctcagcacactgtagccttcgcctcccagattcaagcaattctcctgcctcagcctcctgagtagctgggtttataggcgtgcgccaccatgcccggccaatttttgtattttttttttaattatactttaagttttagggtatatgtgcacaacatgcaggttagttacatatgtatacatgtgccatattgatgtgctgcatccatcaactcgtcatttaacgttaggtgtatctcctaatgctgtgcctccccactccccacaacccacaacaggccccggtgtgtgatgttccccttcctgtgtccatgtgttctcattgttcaattcccacctatgagtgagaacatgcagtgtttggtttttttgtccttgcgatagtttgctgagaatgatggtttccagcttcatccatgtccctacaaaggacatgaactcatcattttttatggctgcatagtattccatggtatatatgtgccacattttcttaatccagtctatcattgttggacatttggattggttccaagtctttgctattgtgaatagtgccacaataaacatacatgtgcatgtgtctttatagcagcatgatttataatcctttgggtatatacccagtaatgggattgctaggtcaaatggtatttctagttcaagatccctgaggaattgcggggtttcgccatgttggccaggctgggcttgaacttctgacctcaagtgatccacccgtctcggcctcccaaagtgctgggattacaggcgctcaccactgcgcccagcctatttcttagaagttttaagaagacagtacttcctaatgacaatattacaagaacaaactagaggtttgagatatactggagatttattttcctgaaatgtttggaatgttgttaaaaagacaggaaacactgtctttcagtaaaagtgaaatgaattattttattgaggccgaagatactgggggaaattttgtttcattctttgactcattaatcaactttatagaaaagaaaccactttttaaaattttttctgagagtgagaaaaaataaaatatatgctaatccagataatttctttgaagttttagaatacttcctgaaatcagcagagattcagccagttgttctaaactctaaatagcatactacaaaaagtaaacataatgctgtctctgagttctcacaggaaaacaactttctctttgctaggagtagtatataacaaaatttaaatttgtttccaaaagaactgaaattgtagtatctacttactgactttctaaatagggagtatttattgagtatctgctacaccgtgatgcaatataaagcagcataaatggactgggtgtggtggctcacgcctgtaatcccagcactttgggaggccaatgagggtggatcacttgaggtcaagagttcgagatcagcctggccaacatggtgaaaccccatctctactaaaaatacaaaaattggctgagtgtgggggtgtgcgcctgtaatcttagctactctggaggctgaggcacgagaatcacttgaacctgggaggcggagattgcagtgagcctgagatcatgccatttcactccagcctaggtagtagaatgagactgtctcaaaacaaaaaacacacaaatgaaaatgcaatcatagagtgcaatgttatctttcatagaatttgaatactttaaaaattttaaaactcttataacttaatcataaaaagacaactcattaataatgagcaagagacttgaacagatagtttacaaaaaaagagtgtataaaaatacgcaaatggcaagcatgaaaagatgtttaatgtcattatccatcaggaaaactcaaggtaaaaccagcgtgagatagtactacaaacccagtagaatgactagaaataaaaaaaacctgacagatccaagggttggtgaagatgaggggcagcctgatttgttacaccaatagaaatgtaaaatattacagctacttcagaaggtttttggacagtttttctatttgagataaatatgtactaaatcctgtgatccagcagttcctctcctggcatttacccaagacaaacaaaagcaaatgttggccgggcatggtgactcacacctataatcccagcactttgggaggctcagggaggaggatcacttgaacccaggagtttgagactagcctgggcagcacagcaagaccatctttatttttaaaaacagaagaaagtaaatgtccataaaagtacttgtatgagaatattcatgggaattttattcatagccaaaaagtggaaacatcctaggtgtctgttaacaagtgaatgtagatacaaattattatattgtcatacagtggaatactactcagtaataaaaaaagaatgaatttctcataatagaacagcttgcatgaatctaagaaacaaaagacacagttcctgccatcagagggttaacagtctacatgagggtgggcgaataagacacattcacatatataaggaaacctattcagatgagcagtgcacatattaagaattcactaaaattagctgggtgtggtggcacacacctgtagtcctagctactcaggaggctgaggtgggaggatcattggagccaggagttggaggctgtagtaagctgtgattgcactgctgcactccagcctgggcaacagagtgagaccctgtctcttaaaataaaaaaaaagaaaataaattcactaaaataaatcaagggcaggggactaattggagaaagctataaagaagaggaaaaatgtgttctgggcatggaaaactgcagctataaattgcctgttggttgaaatagacaggacatctcaaggacttttatcccatggtatcatctctcacagtactttattcttttcctttgaattctttaccgcgtctgtacttagaattaccaattaatatatttagtggttataactccccctctctctaggctgtgaacaccagtttttttctatgtcctatacttaacattcttacagttcatgacgtataattggttttaaataaacctgtgttcaatgaatgatgttctcaagaatcaggagtatataaggtgttttggagtaagaattctgcagggaggcagatcttctagcgcattgaggggtttttcttgtctggatccaaagtttggtagcagagacccatggaagatttggaacatcaaactggaagtgtgcaaagtggtgttctgagaagatgaattggtaacagttctctagaaaatattagatagagaagaaacagaaaatagggaaacagcttaagagctaggcattgatgtggcccaaatgtgagatgctgaactctaagattaaaaacatgtaggcaggctgggtgcagtagcttaggcctgtaatctcagcactttgggaggtggaggtgggctgatcacttgaggccaggaattcaagaccagcgtggccaacatggcgaaaccagtctctactaaaaaatacaaaaattggccgggtgtggtggctcacgcctgtaatctcagcactttgggaggccaaggcgggcaaatcatgaggtcaggagttcaagaccagcctggtcaacacagtgaaaccccgtctctactaaaaatacaaaaattagctgggcatggtggcatgtgcctgtagtcccagctacttgggaggctgaggcaggagaatcgcttgaacccgggaggtggaggttgcagtgagccgagatcccaccactgcactccagcttgggcaacagagtgagacttcgtctcaaaaaaaaaaaaaaaaaaaaaaattatccggacgtggtggcatgcacctgtagtcccagctactcaggagactgaggcaggagaatcgcttgaacccgggaagaagaggctgcagtgagccgagatcatgactctgcactccagtctgggtgatagagcaagactctgtcttaaaaaaaaaaacaaacaaaaaaccaaccaaacaaacaaaaaaccccacacacacataggcagattgggaaagctttacctgtgaagaacttgtggttgtttcattattctatcttgtctactttgtttgaataggaatagttagtcatccgaggagtcattactgactgttctgagaagtgtatggttttcaataatatgtttcctgataatgttaaatgttttagtttctaagaagtgtctttatccatgctaattggtattgaattcctttttttgtctgtttcccctaagtcaaaacaagagaagatggcgtgtagagataagagcatgcaagaccgcttgagactgggccactttactactgtccgacacggagcctcatttactgaacagtggacagatggttatgcttttcagaatcttatcaagtaagtgaattgttatgattaaatggagaattgaaaagttcgtttgcattttttaggttttctgtaattgtagtcattaataatcctactattggtagtcatcttttcagttagttttttagtcaccacatgtggaaagaaatgtatcgaatgaggtgaagtcctgaaaaaaaacgacacaagtaaaatcaggagtacaaaatgagttccagaaaataaataaagtatgagttcaggccaggcgcggtggctcacgcctgtaatcccagcactttgggaggccgaggcgggtggatcatgaggtcaggagttcaagaccagcctggccaacatggtgagaccctgtctctactagaaatacaaaaattagccaggcgtggtggcaggcgcctgtaatcccagctacttgggaggctgaggcagagaactgattgaacctgggaggtggaggttgcagtgagccgagatcgtaccactgcactccagcctgggcgacagagcaagactccatctcaaaaaaaaaaaaaaaaaagaatgagttctgcattaaaacttaaaagaatcagaattgctgaagctaaggaagaaaaacctagggtttgactttctatctttctaattatataatgaattttcattaagagtctattgagcatttcttctggatccacagaaaaatgaaatgtgaaaggacctgagaaagaatttcctgagataagtttaggtataaagcagaataaaaccactgaagaactttataggacatgttcctgggattatttaaggagacagtgtccagtcatcagagagtcacttcctggaaggcagtggtgaccagccccactgtgtgtgcctgtgtgcagcttggaatcttgaacattcattgtctttgtcataacttttgatttgaaacattcaggtatttattccaatgagggaattaacatttaaaatcctcaaattccaactgtgtgactagctaccgttagcttagatctttaaatgtatatagatatcttcagattgcagtaccttttggtgaatcttctttttttttttaatctctaggtcatgatgagttggaagggtctatagactgcctttctttcctgtgtttttttgctgaaatagcttgttgagtatgaattggaaagcatgtgactacttttgagtaataatgaaacaaataagaaacttatgcctgaaagaaaatacaaatattgatgctatttataatatttgttaaaactaacctctgagttagacgttagtagtccttgttttatgtgtgaaacattaacctccaacttagattaagcgtgtttttgcttcatgattattcctcatgtgtgtatattttggtgtgtgaagaggctttcaagtcaaagaataccttggaaggaaagcacagacttttcttaggccggcaccagacattcagagcagcattcactctgtgctcttaagcataggtggctggtgatagcagaggtatcagggcagtgtaaacagcagttacatggaggtatgatacctgtttataacatcctggccaagacatgcaagttgtcctggaagtgacataccatccagtttccagatttgttaaaatggaatcagaagaagataaaacttaagatccacatagtggccaaagccacctaatgcttacactgacttctagtagtggtagtcactctgagcagccctgtcaatggctactatttagatagcagtctttttagactttgattcaggaaagatggtgagtttgtatagagatgtaattagttttaagaagtgcttttggccgggcacagtggctcttgcctgtaatcccagcactttgggaggccgaagcgggtggatcagttgagcccaggagtttgagaccagcctgggcaacatgatgaaaccctgtctctacaaaatatacaaaaattagctgggtgtggtggcacacacctgtggtcccagctacttgggaggctgaggtgggaggatgacttgagcccaggaggcagaggtgagtcatgcagtgagccgagaattgtaccactgtcctccagcctgggcgacagagccagaccctgtctcataacaaaacaaaacaaaaagaagtggttaaacttactgcttatagtagcaatattttatctcttactctaaaagcagcttgatgcccacgagggtctggaaatctgtatggtagagtacaaaatgatgactttgctatagagccaccagatcagaggaagtgagactatgtaaatgaaatccctaagtaggactcttcactgtaggtggatagcactgttttaccattttaagtcatataaatggccagaaatctgtgtcttctcttgggaagatgtttctggctgatgtctattaattataggtattttagttcctgaaattttgctttaataaattaatttccttcagtatagaaattgaaattctctagttgtaaaaggctatatctaatagcctcagaggtcacaattctgcacatgagaaactccaagacatgtgaagtaatttggtgggtgaagtagctgaacactaacaacactactaggttttatgggaagagacaaacctaaaggcatttaaaaaatgaatcagataatcaaatatagcctcaataggacccttagcaccatttttttttgttgttgttgttatttttgttcactggttctttttttgagtgatctttaatttcctaaaacagaagattcattgtctaataggaaaattatatcagatttgtaatattttttggccagtttagtaatttttgctttccacagtatgtttgaatcttttgaaaaagtagcttattttatagttctgagaaagtaatgttaaatactaaatgttaatgttattcagtatatcactttttgtttaaagaagtctcaaacagtccatggcaaggcaataaaaattctttactaagattttgtttatgttgaagtaaacaaaattaaagtaatgggatttggccagatgtggtggctcccacctgtaatcccagcactttgggaggctgagatgggcagatcacttgaggccaggagtttgagaccagcctggccaaaatgatgaaaccctgtctttactaaaaatacaaaaattagttgggcatggtgacacacgcctgtaatcccagctactcggcaggctgaggcaggagaattgcttgaacatgggaggcagaggttgcagtgagccaagattgtgccactgcactccaggctgggtgacagagcgagaccctgtctcaaaaaaaaaaaaaaaaaaaagtaatgggatttgacctgtgtacaaaattgtgatcatttaagatgcatataactagaggaagaaattaaagtttacagcattgtaatgctagtccaggtatttattctgaagtgtaacaagttccagtatccatttcatttattttattttgagacggagcctcactctattgcccaggctgcagtgcagtggtgcaatctcggctcactgcaacctctgcctcccgagttcaagtgattctcctgcctcagcctcctcagtagctgggattacaggtgcccaccactatgcctgatgaatttttgtatttttagtagagacggggttttgccatgttggccaggctggtcttgaactcctgacctcaagtgatccacccaccttgtcctcccaaccagtatccgttttaaagcaatttacgtcaaaccatctgattctcagtcatatgattcactcattttgttgattttataaacattagatcttctttaggtatcgtataccatttcacagctcccagtttatacagaatatattcaatcctgggaatctttaaaaatctcatctgggctggttgtggtgtggctcatgcctgtaatcccagcagtttgggaggtcgaggtgggtgcatatcctgaggtcaggagttcgagaccagcctggccaacatggtgaaaccccttctctactaaaaatacaaaaattagccgggcatggtggcgtgcacctatagtcccagctacccaggaggctgagacagaattgcttgaacctgggagatggaagttgcagtgagctgagatcacgccactgcactccagcctgggtgacagagtgagacttcgtctccaaaaaaaaaaaacaacccatctgggatattgacatgttgtttgaagttttgaagtttcagacctctcagagatgaaatagataacagattatttaaaataattttgtttaaataatgactggaaatacgtgctttttttttttttttttttgagatggagtgttgctctgttgcccaggctggagtgcagtggcgtgatctcggctcactgcaacccctgccccctgggttcaagcaattctcctgcctcaacctcctgagtagctgggactacaggcacacaccaccactcctggctaatttttgtatttttagtagagacgaggtttcaccatattggccaggctggtctcaaactaagtgatccgcccaccttggcctcccgaagtgctgggattacaggtgtgagccaccgcgcccggccacattttttaaaatacctttactactagttacttcttgtatggttgaagtgtaaaatgtagttttgctgctgaaggtacccgcatttcagttcctgggatgctgtaacaaataccataaactgggtagtttaaagtaacagaaatgtattctctcacacttcaggagtctgaaagtctgaaatcaaggtggggcaggaccatacttcctcaaacctttagggaacatctttctttgcctcttcagcagtgtggcagccccaggtgttgggcttgcggcagcataactccattctctgtctcctcttcacatggtgctctccctgtgcgtctctgtgtcttctcttctcataaggataccggtcatattggattaaggtcctatcatgtccagtatgacctcatcttcactagtaatatctttattcaccctatttccaaataaggtcatatcctgaggtactaacgactttaacacatcttttgggggacacaacccataatggtgcagaagattgattgtcttgtttctcttttgcaggcagtggcttggtaaatagagttatttagatttgaatgagatggatttattgggtcctcaatacttctgtaaaatatagaagaaatagcctcttgctatgggtgatgaagggcgagcgctctctaaaattgatgctatacaagaaatatttaaggatcaactctgtgaaaggcactgttaatgcatgctgggggatatacggattgctaagacacgattcctgttctgtgagaagttacagtttgacataatccagcctttgtactcccaaaataaatctaaatgaagtaccactgatagactctctttattcttttcttcttcaatagctaaacagtttcaggaacatcaagaattgatatgggaatccttaaaatacgtaacattgatctttggtgcatcagctttcatgttcaaactttcgttctcagaatgtgcagtttaggatttccctaaaggtgttttggaatctgtgtcccttgtgttatggtttatatatattatggctgtggggagcatttcttggtgaatctgaagagattaaacatatgaattgtccttgaaaataatagattattttcatgtttgatgaaggtgattgctaaaatctcaattttgcaaaacactgttaatcttcaaagacaaaatgttgtggcactccactaagctactctagtttatagtttaaactgtatattgtatgtttatctgtagggagttcagagtgtcttacattcatggcccctgaaaagggtagaaatgagctaaagatgtttactagttttttaattgggaaattcatgttcagttaaggtaaatgttttctccagaataaagattgtgattttttacttaaggattctgtgtctcaacccagatttctttcaagccatgaattatatatatagttgtcccttgtggggaattggttccaggaccttcctcagataccaaaatccatggatgctcaagtccctgatataaaatctgtagtatttgcacatagcctatgcatatcctcccatatactttaaatcacctctggattacctataatacctaataaatgtaaatgctatgtaaataattgtcatactatattgtttatggaataataaggaaaaaagtttgtacatattcagtatagatgcagccatcttttttttttcgtgtattttcaatctgcagttggttgaatccatggatatggagagccatccttatatgtgttctgtgagtagggatgaggaggtctagctaataatcaaaaagaattttcaggcaaacagaaaactcttgaattatcattttcattttgctgttcgattgatgtctaatcagtgacctggctcatcttgaagccaagggcatagtattatcaagtgactggctgtttctttgtaatactctgattaggttaattttgcatacagcattgcccttctagatatgttcgaataaactgtattgtgggtatctaccttagagtaatcttggttttctgcttgtcgttcttccacgaaagatactgtactgaatctggaaaagatctgacagcaatgttcagggaagagggtagagcaacttccatttgagtgtaggttttaaaaaattagattttgccgggcacggtggctcatgcctgtaatcccagcactttgggaggctgaggcgggtggatcacttgaagtcaagagtttgagaccagcctagccaacatgatgaaaccctgtctctactaaaacaatacaaaaattaactgggcatggtggcgcacacctgtaatcccagctattagggaggctgaggcacgagaatcacttgaacttgggagacagagcttgcagtgagctgagagctgagatcgtgccactgcatcccagcctgggcaacagagtgaggctctgtctcaaaaaaaaaaaaaaaaaagatttattattccacaaaaatgaaggttggttccacaaaagagaatgtgtggaaaagcacagtagaggaagaaggagaagggagctatcatttgattgtcaattatagtgggtgacttaaagactaacctgttagatggttaatctccaattttgtatgtttttatataccaagtctgtaaaccttaatatctgttaggtggtaggatacatgagagaaagtgttttttttttttacaatggagtttttattggtccctaatttgtaaactagttaatcacagaaaaatgtgacatcttattaggaaatactctaatggtaatggtgttagattaactgcagttgtaaaatatgttttatactaattcattttgtatactattccctaaggagttcttactagttggaagacttcgttgtgctttctccaaatgtatttttcttttaaaaacttaatctaggtgtcactgtatcagtgggcggggttgacgtgtagagtagtaatggctcccttagactagaataaaggataggtctaaaaagaaaatcttgtttactttctttagcatcctacaaacttggtatctttttacgtaaaactgagaagctttcatccaaagaaaaataaaatagaacttggaactttttacaacttttaaaatacgatttacttttaatgggttcagatcagagaattgtttccttagctgttaaaaaggaatcagaaaattgttccttctgagtcagaaaataaggtcacaatagaaatttgatatgttccttcctgtccactctgaaaatagtaataactagtgtcttaaagcacagactcattcccagaaaacatctatcaccaattatttggcccttccaatctgaagttaaaatcaaatctctacttgacttaaaggggcttattttttctgaaattggatacacaagtgacaaattgtgtgtgttccatagctgtggtaaaacttttgactttctttctttgtacaacgtcttttatatctctaggcaacaggaaaggataaattcacagagggaagagatagaaagacaacggaaaatgttagcaaagcggaaacctcctgccatgggtcaggcccctcctgcaaccaatgagcagaaacagcggaaaagcaagaccaatggagctgaaaatgaaacgtatgttctttattgacgtgaacgctgagacaccacaccctgcccccaaatacaaatgttgattgtcaccggcaatagttttaaattcttgaggtcactcaggtttaaaccttcttttcagttacattaatggatttgctcaactcatataaatgccatataaaattaattgattttcttaaacctgctctttctttagggcattttgaatgagagggaaaagtaatgtcacttgacatcatgacttttggccactcctggttaacaaataagatgtcattgtactgaaatgatattattgcttacatgtggctgcagggtgtggtacactagtatcatcttatgggagttacctggctgttatttcagactgaagaatgctctttactggtcaaaagagcacttagttaatagtcacaaacttaggataagccccccagaaagctgttatgttagaaaaggacattgtcccaataagccacaacttgatctcatcagaattgtttcctgttctgggaatctaaggaaaacaccagtatcttaaactgcagtacagtcatctttttctctgtcactcaacaatatttacatagctaccatatataggaggagtagaaaattctaagcacaaatgcctgccttctccattcttctcttcctttctgtttaactgaaagtaagtttcaagtccaaagatagctgcagataaaagatatataacttatcaactaatatgtcatttgctttatgttttcatattagttcacaaaaacaacacataatccacttcaggtataataatacttgtattatattattgttaaaagtctgtggcatcctagaagtgcatcttctttcattctagtgagaaagatggcttaacaccaatcctcaccccatacatatctgatgttttgggaagtctcttccttgatgttcgtttagtaagtttatgttaaatgcttattttatgctaggccctcttctgggaatacagagctaaaggatacagccccagccttaggagcccacagtttacttaggtgagatgaacagacgaataaactaataattacattaagtatagcgataaaaatgtgcataatgaacttggaaaacatcttcattcatataactccaaattttgttgttgttgttttttttttttgagacgaagtctcactccgtcgcccaggccagagtgcagtggtgctatctcggctcactgaaacctgtcttctgggttcaagcgtttctcctgcctcagcctcctgagtagctgggactacaggcgtgcaccaccatgcccagctagtttttgtatttttagtagagatggagtttctccatgttggccaggctggtcttgaactcctgacctcaaatgatccaccctcctcggcctcccaaagtgctgggattacaggtgcgagctactgcacccagcccaaatgttacaaaactagagtcttgttttcccttgattttaaagactagtcaagtgcaataatgagaatgagaagaggggaagagtattgagtcttaaatataaagtattttcctttcagcaagtccaagtaggggctcaaatttgaaagattgtccaggctaattaatctgaccaatgttttctttcatgactcctgtgtgtattttgtgaagggactttccctctagtattatttgaaaattatttaatgctaatgcacaaaaccattggcttaggagtgataaagaaagcataggttgtttctttgccacagaagaataattagaatgcaatctaggctagtaatgtgtaagcaattgctatctggtgtcctgtgtaaaatccaatctggaagactttcagtccagtttttaattagagtatctgtgacttggctcttactttgaccagaagccagaagtaggcctctggggtcttggagtgagccatattatcctttcttggccccgaacctgtttcagacagagaattcttagccatcatttttaatttttctgtttttcgctggtgtggaatggagtaatagatacaggtatttctgcatctgtaaagagatagccctagtgggtgagtttcttcttctttctattttttcttgagttagacctcaaaggctctgttctggttgataggatagatatttcccctttcttctgctatttagaatatatctaaacagtgatatctaaaaatattaaatatctatatgcttctagaatgcgaagaaggtagagatggaagaaaaaataattctcacttgttcatctttttttcttttattttctttctttctgtctttctctctctctctctttcttttcttttcttttctttcttgagacagagccttgctctgttgcttgggctggagtgcagtgacatgattatagctcactatagcctcaaccttctgggctcaagcaatccttccatctcagcctcctgagtagctgggactacaggcatgtgccaccatgcccagcttctttcttctttttttcacagagacagagtgttgctttgttgcccaggctggtctcaaactcctggctccaagtccttcccgctcagcttcccagagtactgggattacagtgagccaccaagcctggccacttgttcattcttgagatgtaaggatgctgttggagtagttggaacatgaaacacatgactacccatcaagtcagccctttgagagttgatttaaatagcattttcaatattctttatatgttgtcatttaatagtcactctttcttagataggtattatcacttgctgcatttcaggaaactgagttaaagaggttaaatttgcttgcgcaaggtcacatggccagtagcttagtagtgctttgaaccctagtcctcagactccaaatcctagactctaatttgctgctatatctttctctttgttattacagtatcaaggtttaagtattaacaagaataatcaaatccattggcttattgttttgccctctaaaaaatttttagagaatttttggctgtctctgaatgagtttttatcttagtaatatatggcacaaaactcatttcaaaaataatataaaaatatggctcacttttttttcttttttatgttttgcaaattagacttctggctttgaagttcttccctcacatcacatctggtaaatcacagaagttttctcttgtcagaggactacaagataacccatctttcagtcattttaactgagactgaaactgaatatgtcttatagtatatttgagcatttctctttaaacaggcaaactatgatttctagtagtttactgaaacttttaccactgtttttcaggttaacgttagcagaataccatgaacaagaagaaatcttcaaactcagattaggtcatcttaaaaaggtaagtataatgagaaaatctccctggagaaatgtgatacctagtttaaatttggggttgaagctatttggtcatttgggtgaatgtaatagtagctgcacatagcagcagaaagcttcagtgactgctttcactgtcatgtcttgtagcctaatggtagaactcatatttttccattttctttcttcttcttttttttttttttgagttggagtctcactgtgtctcccaggctggagtgcagtggcacgatcttggctcactgcaacctccacctcccgggctcaagcgattctcgtgtctcagcctcctgactagctgggattacaggcacgtgccaccatacccagctaatttttgtatttttagtagagacgggggtctcaccattaggctggtctcgaactcctgacctcaagtaatcctcctgcctcggcctcccaaagtgctgggattacgggttacaggtgtgagccaccatgcctggcctatctttgcattttcaagtcaattccagcaacccaatgacagtgtttttccccctagtgatctatcagcagataattctgtacacatcataaggcttcccaagtggttatccttggagtaaaatttaaatatataacaagagcagatggttttgaaattgatgtgaagactcctgtcatatttcaaatcacatagcagctcttattccttgcctaaactagctaaaaagagaaagtgttatgtgaaccttattcaaatacaaaggcacataacatagaatttgttattgatgatgttcactgagatatcttagatgtggattactcagctcttaaaattcagaagcccatacattggtcgatgctctttataggtgataatggtcagtaaagatttactaaactgcttttggtatgtgtgcttttgttttttatttcacatattagttttcatgctgttttcccactgggttctcagagcttgttaaataagtagaacttgctggggatggtggctcacacctgtaatgccagcactttgggaggctgtggtgggtggatcacctgaggtcaggagttcaagaccagcctgcccagcatggtgaaaccccgactctactaaaaatacaaaaaattagctgggcgtggtggcatgtacctgtaatcccagctactcgggaggctgaggcaggagaatcacttggacctgggaggcggaggttgcagtgaaccgagatcgtgccattgcactccagcctgggtgacaacagcgaaactccatcttaaaaaataaaaataagtagaacttaagtcaccaagtgtaatccatacttaaagatgagaaccgaaccagatagataacctgatttttgtaaaaaatgtttccatgtctaaatgtatatgcacaaaacattcctgaaaacttatgtaagaaacttaatagtggttattacatctcaggagtgggcatggagaggagggaggaggagggtagggaacttttacttttcttactgaactcctctgtatggtttgaattttattattttctatgggctcatttttatgattaaaattcttaaagaaatctttcaatgcaaagcaccttcctttagcctttcataagataaatgtctgctattgtttttgaaataagatcccgaaaaggtaaagttccccctattttgtgctatttctttccttttcgctttaggaggaagcagagatccaggcagagctggagagactagaaagggttagaaatctacatatcagggaactaaaaaggatacataatgaagataattcacagtaagctacttcagggcatattgggttggagattgctaagcattttatgatatgaattgaatggtctagaataatgtgtttgcttaatgtaagttacataaatgattccatggtgtatttagctcttttgtagcatctaatacaattttgtgaacaaaattatgatttgccttggtttaaatatacaattgtattaaatttatatattaagtatatatgtgtatacatatagcatttttacatgaataaagattactaaaacaatatggctttgtaattgtaaatggttgagatatgttgcatattcagattttcctacagagccttaagaaagggaagatgggtcacagtgtggtgttgtggaaagagtattgggttgagatgacactcggtttctgaatgacctttaagggctattcaggtgttgagattttaagtaagactcttaagttcagtacattaattgtagatgaattgaaactgggaaaagtaggttgaaagtagaaaggggtttttataagtaatctgttttttccccatattttttggaccctgaaacattttttcataaagccatagcttgtatatttttgtttggcttatatgagctttggacctgtctttctgttaaagtggcagacaacagcaggtaccacttcctgagagctctctgtgtatcaggcttggtcctaagtgcccttagtgctctcatttaatccgcaggataacccagtcatctttaatacattaatcagaaaacaagcttagagaaattaaattaacttgcccagggacccataaataatgtgaccaaagagttcaacttggatctttttcatctaaaccaccatgcagtaatgtctctccagataggcatcctactttcttaaaatccatgtaaagtaatttcagaattaatagtgagattgtttaagatcaggaactaggtaaaaatatttttaaatttgtttttgccagaacttgtcatttctttatcatattattaagaaaatacccaaggtagagtctaatatggggaacacagttatatctgtcttaaagagagaataatgaatgcacatagaacatgtgactcactttaaaatcaaatctgtttttaaggaaatagcaagtgtcttggaattttactgtatgtagttttgaaatggtgggaacatgtggcccttgaatagtttggaggagccaaatagcacaatctaaaaatctctaatctaccctccctcattgtatagcagggcagaaaaaaggaggaggagcaagaaaggtctagtgtagctacactgagaccagcacccaagtcctgtggctctatagctggtgctgttcattgtaattacactgcctctttgaactgtgtaactttatactcagtatttgccatgttgatgttgattgtcaaactaccaacagcagctataattatatgtataatgtgttagatattctgggaattttgcaagcgtggaagactgtagtccatgatctcagggtgttacatgttccctgtttccacagatttaaagatcatccaacgctaaatgacagatatttgttgttacatcttttgggtagaggaggtttcagtgaagtttacaaggtaagtataaggaactggatacaaagactgggggttaaattatcggctcctaccaacttggagaacattaagaatactgataattgtaggttgatatccattggttgaaattcaaaaactttaaaaacctgtatctttgggaaaacagctttcaataaacctaagtgaccaagcagaatacagtattgccattttcaagtttgaaaaataaataattatagatttaaaaaacaagaaggaaatatactgggtcgtggaattatgatttttattctggttctgtacttcctgcctcatacatatttgttagaaaaaagtatgtgctatctttctttcttttacagaatagatgtgtcaaacctgtttccaataagaataggtttttttccattggaaaacctgctttttgttttagaagtgttctaatatcatttactagcactggcagtctgaaagagtgtcctggcttagagtgcttcagttgggctagcgaagtacaggctgctgagcttccaggttgatttttaccaaatgagggattcaatatgttttaaatatagctacagatccataacatgtgggtttgatttttctacgtgtttctggcacctgtctgtaaagtacagaattgtttattaagtagtctttgttgcatagctgtccctttcagaaatacagctttcactgttaggatttatgttatgctcatatgaatttatatgtgataaatcttttcagtaaaatagttttcattgcaaataaaaacggtaaaactatttctactgttttcttattttaattttttttaaattgtggttttatttatttatttattttagagatggggtcttgctctattgcccaggctggagtaaggtagcacaatcatagttcattgcagcctcaaactgctgggcacaagcaagcctcctgcctcaacctcttgagtagctgggactacaggcccagtgcactaatttttaaattttttctagagacggggtcttgctacattgcccaggcaggtctcaaacttatgggctcaagcaatcctcctgccttggcctcccagggtgctgagattacaggtgtgagacactgcacccagctgtgattttattaagtatatgtttcagtggcattaagtactacagtgttgtgcgactgacatcactacatcactgttcatctccagaactatattatgattagtgcactactctactggttttgatattctagtatctttttttttttttttttggagacattgtctcactctgacacccaggctagagtgcagcagtgcagtctcggctcactgcaacctcccactccagagctgaagtgtactcccatctcagcctcccaaagtgctgggattacaggtgtgtaccaccatacctggctaatttttgtatttttttttatagtgacagggtttcatcatgttgcccaggctggtcttgaactcttgggctcaagtgatcacaccttggcttcccaaagtgttggggttacaggcatgagccactgcacctggcttctagtatcttatttgtattttttaatctgtgtttataagtaggattggcccatagtcaccttttgtatgcaagcagctttgtcaaaatttgatgtcataattattctagctacttagatagagttgtgaagtctctttttttccatgctctggaacccttttcatcacttgggaattgttggctccttgaaagtttgttagagttgactcataaaaattcttgggcaggacagtctctgtggctcatgtctataatcccagcactctgggagccgaggcaggaggatcacttgagcacaggagtttgaaaccagcctgggcaacatagcaagaccatgcctctacaaagaaagaaaagaaaaatctcctgggagatgttgagttagtggaaaacatttggctgtgttttcaatttcttctacaactattgatatattcagattttctctcccttcttaagtcagttttggtaatttaatttttctaggaaatctatttcatttagatttttttttcttttttaatagagacagggtttcactgtgctgcctaagctggtctcaaactcctagcctgaagtgatcttcacccctcagtcttccaaagtgctaggattacagccaccatgcttggcctagattttttaaaaatattttccacatcttagttacttctctgttcttgtaaaatttttatttttgtgtttcttgattgataggctagagattagtcagtgttgttattaatttttttcctaagaatcaacttttttgttgatcaaaactatttggttagttttctatttcattaatgtctgctttcattccttctttctgctttcttcatttttatttatgttcattcttaagtcaatgcttagtttattttctttgtaattttttattgtaaaaagatagatataaaatttaccatcttaaccatttttaagtgtgtagttcagtaaagtacattcacactttttgtgaaatagatctcaaactttctttcatcttccaaaactgaaactctgtagccattaaccaactttcctttccccctcctccttgtccttggaaccattttacattctgttactctgaatttgactatgtttagatttcttacagaagtggactcatactacgtctttttataatcagcttattttacttagcataatgtcctcaaggttcatctgtgctatagcatgtgacaagattgccttcctttttaagatcacttaatattttattgtatgtaccacattttgtttatcctcctctgtcgatggacacttgggttgcttccatctctcgcctaccgtgtatagtgctgttgtttttgtttttgttttgtttgtttgtttgttttgagacagagtcttgctctgtcgcccaggctggagtgcagtggtgcaatctcggctcactgcaacctccatctccccagttcaagtgattctgctgcctcagcctcttccagtagctaggattacaggtgtgcaccaccaagcccagctattttttttgtatttttagtagagacgggatttcactgtgttggccaggctagtctcgaactcctgacctcaaatgatccgcccatctctgcctcccaaagtgctgggattataggcacaagccaccgcacccagcctatagtgctgttttgaatttgggtgtccagttatctctgtgagactctgctttcaattcttttggatgtatacctagaagtgtatgtaattttaaatcatcaaaattggttcttggtgcctcccagttacttttagtaatttgatcatcctattttttcctaatgtatttcttcaaacattttatttctttttctcttgagacagagtctcactctgtcgtccaggctgtagtgtaatggtgtgatcttggctcactgctgcaacctctgcctcccgggttcaagtgattctcctggctcagcctcccgagtagctgggattacaggcgcccgaccccacacccggataatttttgtattttttggtagagacggggttttactatgttggctaggctggtttcaaattcctgacctcgtgatctgcctgcctcggcctcccaaagtgctgggattacaggtgtgagccaccacgctgagccccacacattttatttctgaaatctaaatacttcttacagtgatgtgtgcatttaatgtagtttttcttttgctgttctccactctccacaatcctttcttaagtcagtggtaggtcacagtgtcttggatttagaatagaagtacagtgtagtagttagagaaaattatgcttgaaatagcattggtgctcttataaattgggtggtatttaatgtttttttcttttgtggtttttttttttttttttttttttttgatacggaatctcgctctgtcgcccaggctggagagtgcagtggtgctatctcggctcactgcaacctctgcctcccgggttcacgccattctcctgcctcagcttcccaagtagctgggactacaggtgtccgccaccacacccggctaattttttgtatattttttagtagagacagggtttcaccatgttaggatggtctcgatctcccgacctcatgatccacctccctcggcctcccaaagtgctgagattacaggtgtgagccatcgcgcccggcttatttaatgtttttaaaaattatttgaaatggttttctactgtgaagccataatggtattcatgattgtgaatggactgaagattctttaagaaaagaagttcaaaagtttccatttttggccgggcatggcctctactgcctctaacccaatattttgagaggccaaggtgggaagattacttgaggccaggagttcaaaaacagcctggcaaacacattgaagccctgtctagataaaaaaataaaaataaaaaatgttgcaatttttgtgaaataagatattatgtctgaagtgagtggtttttatactttaaacatactggttttaatttggtataaatgatggaagtttctctattttataagcagctctctctacatgcagtgcttatccagagaaacttaggtttagatagatctgtaaagtagtgatcaccctatttaggtactgttttctgcacttgttgccttcatttatttgtatatttgtggaaattagcagatgggtgataacagtgttgaaactgaagtagtaagcttttaatctaaactttacaaactaagaaaaactattctaaagaagctatgcaataaattcttttgtttggagggaaatcttcaattgaattgaaagattactttatcaaattatgatttacacccagcttcctcaaaaatccatgttacctttttcactgtgctatagcaagcactacatagctgatgcaggacttgctggcagtggtggccattggggaaagctggttcctgcctctggacagtgctggagaagtgacttggggtgactaacttcagccatttttgggattagaaactgcttttcggccaggcgcagtggctcacgcctgtaatcccagcactttgggaggccgaagcggggcggatcgcctgaggtcaggagaccagcctgaccaacatggtgaaaccccatctctactaaaaatacaaaaattagccgggcgtgatggtgcgtgcctgtaatcccagctactcaggaagctgaggcaggagaatcacttgaacccgagagacagaggttgcagtgagccaagattgcaccgttgcactccagcctgggcgacagagcgagactccgtctcaaaaacaacaacaacaaaaccacttttcatttacccagcatatagagatgggactaaaggcagggctgttttttgttcttgtttctctttttattttaataaacaatatgccaaattacagggtggttttgtaaacaatcataccaaagaagtatattgtgaggggttattttctccaggaggcaggcagtgtgtgtccctggaatttcaaaagtgacaggatgtttgaagcttgtaaagtcccagtgtcaactgaaggataagagacaacctaaggcagacgggtcccagacaggaatagatggtgtccagaaagagaatggttgggaaatgattctgaaggcaggggctatctttctgtttgtggtgttggcctggttttatgttctaaatcccttggtgccagtgtgtctggagacttctaaattatctaatcacaagtttcaagaaggtgcttgcaacactgatataagtatgtgatgtatttaataatgtattttggactttgattatgttatatgttaaattaaagcttcacatcagttacctgtaatttttcttaacatttacccagtatataatttattctctttataggcatttgatctaacagagcaaagatacgtagctgtgaaaattcaccagttaaataaaaactggagagatgagaaaaaggagaattaccacaagtaagtgatacttgagtgtctgactttttaaaattaaataatacctgtagtttgagcattatgctacaagctttacgtgcattgttgttggttttgttttatgtaatcttcataactgccctgagagaataaatacattctcagtgttacgacgaggaaactgatgcttacagaattggagtaacaggaagtggctgagctggtatttaaatccagactttcctgaatccaaagccctaggtactcttaaccttcccttcctttgtggctagaaatagctatagtaaataaagccttagaaatcatttttgctggccgggcacggtggctcacacctgtaatcccagcactttgggaggctgaggcaggcagatcacgaagtcaggagatcgagaccatcctggctaacacggtgaaaccccgtctctactaaaaatacaaaaaattagttgggcgtggtggcaggcatctgtagtcccagctactcgggaggctgaggtaggagaatggcgtgaactcgggaggcagagcttgcagtgagccgagatcacgtcactgcactccagcctgggtgatggtgcgagtgcgagactgcatctcaaaaaaaaaaaaaattgttgcttgtctatagaaactagaccctagggagctgctggtgggctgtttctgctacttcagtcatttccttctagaagagactgggggcacctggtgtgtcttggtggcacctgtttgacttgttcagcctctctgtgctatgttctcctcccggtcacagtttgcccatctcaaagttcttggtcttcagggtcccacttctgtgcttgcttctctatagaatagtactagtggcagccttcatctgtacttgggatgtggggtagagagggggggcttctttaaaatgaattgttacaatatgcacagctgtgaattgctttgttccactgatgtcaggttttgcctatatctccccaagcttctgaacgttggagttcatggctcatttgctttagaggctatgcagacttaatttgctattaggttccccactgggcttagttttgtttccttgttgttggtacaagtattgaatcagacaagtcctgcccttgaaaggaggggacaggcttttttgacaaagcaaacacctcctttctataaaggcagtcttggttttttttggtgttttgtttgtttgtttgtttgttttataaataataatttggaaggggaaaaacagtggtctttgaagtagccctttagttggcttctagcctggtccaaggcaactcttgctctatacctcttgttcatcagggacccagaagttcttcctgttccagacagatgggcagtggtgctcagcactggagaagggaaggttcctgctacattaagagcaacagggcttagcagagggagaagggatgacctgtggcaccctgcgtgtgtttcttaggtgacaggcagctgcagtccagatgctcctgaggagcagttacattattataagaacattccagtcacttgatatgtagggatgagtggcacaccgtagtgagtgccaggagcacttcagagaaggaaagcacatgttgttctgaccagttataagtgagcaatgccactactgtattgagaccctaagaatgcctaagggtgttggaccagtacatgcttctctttaaaaatgccctgtagggcatttttatacatatacagatgtatatgtataaaatatacgtatacatctgtatatgtataaaatatacgtatacatctgtatatgtataaaatatacgtatacatctgtatatgtataaaatatacgtatacatctgtatatgtataaaatatacgtatacatctgtatatgtataaaatatacgtatacatctgtatatgtataaaatatacgtatacatctatacatatacatatttttatacatatacgtctcctgtgctgagacgtatatgtattttgcctagtctcagtatccaggtttctggctgaccttgcagagagctctagtgttggataccacagcaactgcaggtgggcgttctgcccatctagccttttgaaacactgaggagtggaagccgggccttgtccctccttcaaacagttggcaagcactctgaggcctggtgggtatggattgggtgttttctcacatatgtctctaccagacagaatcagagagcacgtgaaggggatggtcctatttgtctaagttctttccattcaagttccaggctggcattggtgcctttctactctgtttcctcatcagaggagggatcatggtgcctgagctcatctgaggagggggcatttcctatttggcagacaccttggggagagggtgtgtgagttgttgtgaccttcattcttgcttgggcagctggggggagttcttttttttgttttgttttgttttccaatcaggaagcagcactgaggagacaattcttaagtacctccacctttcttttgaaagaattggctttctaagtgatataaaatcatactcatgcatttcaggctatagaaaatggcgaattgacaaaatgtcattaactgctttgaactaaaaggagacttacatcaagcacataacggacattgatgagtgctttaaaaattcagtattaaactaaaaagtagtacacttcagtgttgtgacattataaaatatgaaaatgctataaccctgctagtaaggtctgttaattgcgtttccattcatggggatgacttcccagtcccatctggaatcaagacatttattctggtaaaaaagaaggcagatttcaaaagaaaataaaaggtgtttgttttgttgtattttgaattttgttctgtcacttcattcctctcctcctcctaccataagcaaacaaaaagtaaactgattgttttatttatattataaaaacaaattttattaaaaatttttattttaaaaatttagtattacgactgctttaactccctcaaataacatattaaaaattctgccgtaggaaaaatttcacttaaaattatttgcagaagtaatttgtatcggagttagtatgcttttgtatgatactctattctaattttttaaagataaaagtaagcattttgaaaaatctaaatatatgttaacttataagagagtaaaagacattttggtggatgagtttcttccagtttctcattaaattctctgtatttgtagtgcatggatctcttggattataagttgaaagttgaacatggctcagtcattgccttgctgatgaagtaagagatgcggttttagagctgggcacaggttcagcgacactctgcaaattcccttaattggcgagaactttgaatgacattttgattcttaaatttttgctgccttttgtttcctgtgttttctgtacctcaacaagagaaattggtttctgctgtaaaatgcacaaaatcaagaagttaaaaccaaagggtagagcgctatacatttatagcatgctagagtgaaaaataacttagaacagtgatctgtttagtccctagatttttaaactttttgtttgttttttgtttttttgagacagagtctcactctgttgcccagactggagtgcagtggcgcgatctccactcactgcaagctccgcctcctgggttcacgccattctcctgcctcagcctcccgagtagctgggactacatgtgcctgccaccaagcctggctaacttttttgtatttttagtagagacggggtttcaccgtgttagccaggatggtctcgatctcctgacctcgtgatccatccgcctcagcctcccaaagtgctgggattacaggcatgagccaccgtgcccggcctttaaccttgaaaaaaaaaacaaaaaaaacaaacagcagcaccggctgggcacggtggctcacgcctgtaatcccagcactttgggaggcggaggtgggtggattgcctgaggtcaggagttcaagaccagcctgaccaacatggtgaaaccccgtctctactaaaaatacaaaaaaagttagccaggcatggtggcaggcacctacctgtaatcccagctgctcaggaagccgaggaaggagaattgcttgaacccaggaggcagaggttgtggtgagccaagatcgcgccactgtatgtactccagcctgggcgacagagcgagactccgtctcaaaaacaaaaacagcagcacgcttattttatcaaatgcaatattacaaggaatcttaatgtatttaaaaatgcaagtgtgctggcagaaaggggactgatgattctgtgactctgcagttgcagaagctccgtgtaggagattatttggacatagcgattaaccctcttaatcaggtgccacctccttcagggcacatgagatcatattaaattctttttgagatagggtctcactatgttgcccaggctggtctttaactcctgggctcaagcaatcttcccacttcagcccgccaaagtgctgggattacaggcatgagccaccacacccaacaagatggtattaaatctctttactgtttcttgaatgtatttttcagtcagttttgtaaaataaaaacgtacatactttttcctctcctgcttattgcccttaagcctttaaattctaaacaaattgtaatgcatcctatttaggagctagatttggtgatgtgctattgtatgattactaatagaaaatctgggcagggcgtagtggtccatacctgtgatcccagcactttgggaggccgaggccggtggatcatgaggtcaggagtttgagaccagcctggccaatatggtgaaacccggtctctactaaaaatacaaaattagctgggcatggtggcacgcacctgtaatcccacctacttgggaggctgaggcagaagaatcccttgaacccaggaggcggaagttgcagtgagccaagatggcaccactgcaccccagcctgggcgccagagcaagactgtcttaaaaaaagaaaagagaaagaaaatctgtatgtttctagcccttctgtaaaatatgaagaaaagtgctcttagcactctgtgtaaaactgtactgttaaatatatgtaatttaaaaaaaaaaaaaaccagcgtggagctactttggaattgagggttggggaggccaaagctacatttgctgagtgtctgcagcaagctcacttcaaaacatccagtccagtggtgccgaaaccgaagctcagagaggtggagccacagagccacagcaaggagccaggcctctgtgtccccagggtagtgtgtgttctaacacctgcctcagtgctggcaagtcgttttttggaaaaacgtaaagatgatgaaatgaagcgtcaggggaggcaaaatggccaaaagtggcagcttggaaactaagcccaaatagtttccattggggaaaaatatatgtaattacttttagattcctatttctccctttccccacttcccctaatttttccctcagcttttctttagttagtgcttttctttggtatactggagtttaccggtttctgaaaacatcactgttttttagttttattttaccgtactacggaaagtgtgtcttttccaactagccttataacaaaatgtcctaagccaaatagtgctgaattacttaaaatatcagttactgtctttgtaaataagaactacattctttcttctttttttttttttccgagacagagtttcgctcttgttgcccaggctggagtgcaatggcgcaatctcagctcaccacagcgtccgcctcctgggttcaagtgattcccctgcctcagcctcttgagtagctgggattacaggcatgcgccaccaccccggctaattttgtatttttttttttagtagagacagggtttctccacgttggtcaggctggtcttgaactcccgacctcaggtgatctgcccacctcagcctcccaaagtgctgggattataggcacgagccactgcgcccggccagaactacattcttaaaatagtattggtaattacattgtgtaagcatattctgttcttctaaaattcagaatatgaatatgtcagactatacagtacacttttgttccttatgaaatgatttaaactagaaaagtaccttaaaaatgctaatcatattagtcatatgttgcttaacaatggggctacattttgagaaatgtatcgttaggtgattttgttgttgtgcaaacatcacagagtgtacttaatgtaagcttagatggtatagcctacttacatacctaggctgtatggtatagcccattgctcctaggctacacacctgtatagcatgttactgtactgaatactgtaggccagtggtttccagcctttttggcaccagcgaccggttttgtggaagacagtttttccatggaccggggacagggggagatggtttcaggatgattcaagcgcattacatttgttgtgtactttatttctattagtgttacattgtagtatatactgaattaattacacagcttaccataatgtagaatcagtgggagccctgagcttgctttcctgcagttgaacggtcccatctggtggtcatgggagacagtgacagatcatcaggcattaggttctcataaggagcacacaacctagatccctggtgtgcacagttcacagtagggtttgcactcctatgagaatctgtgccactgctgatctgacaggacgtggagctcaggcggtcatgcgagctatggggagcagctgtaaacacagatgaagctttgctcactcacccactgctcacctcctgctgtgtggcccagttcctaacaaggcacggacctgtactgggttggggacccctgctataggcagttgtgttactaattgtgtatctaagcatatctaagcatagaaaaggtgcagtaaatatacagtataaaaatggtacacccgtaccattaatagaatttgcaaaactggaagttgttctgggtgagtcagagtctaggatactgttgtacactactgtagactttataaacactgtacacagaggctacactacatttattaaaaattttttcttcaagtataaattaaccttcacttactgtaacatttttgctgtagaaactgcctttttttaacctttttgactctcataataacacttagcttaaaaaaatcacattgtacggttgtatgaaaatattttctttccttgtatccttattctataagcttttttctattacaatttttttttatttttaaacattttttgttaagaactaaggcacacaactcattagcctaggcttgcacagggtcaggaccatcaatatcactttcttccatctccatcttgtcccactggaagctcttcagggccaataacatgcatgaagctttcacccccatgataacaatgccttttcctgggataccctccgaaggacccgcctgaggctgttttgtagttaattttttttttttaataagtagaagtggtacactctaaatttttttttttttttttttgagatggagtctcactctgtcgcccaggctggagtgcagtggtgttatctcagcttacttcaacctctgcctcctgggttcaagcgtctctcctgccccagcctcccaaatagctgggattacaggtgcacaccaccgctccctgctgctttttgtatatttagtagagacgcagtttctccatggtggccaggctggcctcaaactcctgacctcaagtgatccgcctgcctcagcctcccaaagtgctgggattacagccgttagccaccgcccctgctctctaaaatttaaataattaaaaagtacagtgcaggccaggtgccgtggctcatgcctgtaatcccagcactttgggaggccatggcaggcggatcacttgaagtcaggagttcaagatcaacctggccaacatggcaaaaccccctctctactaaaaatacaaaaattagctgggcgtgctgggatgtgcctgtaatcccagctagttgggaggctgaggcaggagaatcgcttgaacctggaaggcaaagaccacagtgagctgtgatcgcgccactgcactccagccttggcaacagagcgagactccatctcaaaaacaaaaaaagtgcagtacataagccctcacttagtagcagtgataggttcttggaaactacaactttaagggaaacaaggtgtaacaaaaccaattttaccataggctaattgacataaacaagagttaagttcctgtggcatattcctggtcacaaaaacattacccagcttctaaataaagactaaaacacttctaatactaaacgttgaaatgtatatgagctttatatacatttaagaaagtttaatagaaacaaggtaacatttacccactcattccccactcagggttgagggtggccagagcctatatcagcagctcaggggcaaggtgggagccaccctagacaggatgccatcccattgcagggcgggtacacacacacacacacacacacacacacacacacacacacaccccatgtgggtatgccggtgaacccaacacatgtgcctttgggatgtgggaggaaagcagaataacctgagaaaacccacacagataggggaagaacaaacagactccacatggacagtggtgccgaccaggaattgattttttttttgagacggagtctaactttatcacccaggctagagtgccatggcgcagtctcgcctcactgcaacctccacctcccaggttcaagtgattctcctgcttcagcctcttgagtagtggggattacaggtggccaccaccacggccagctaatttttgtatttttagtagagacggggtttcaccatgttgggtcaggctggtctcgaactcctgacctcaggtgatccagcgacctcaggtgatccacccgccttggcctcccaaagtcctgggattacaggcatgagctgccgtgcctggccccctttttttttttttttttttttaaatcagcgttataacaaaatgatgttatttaagggcctgctgtatagtaaatacataaaccaataatgtattcatttattatcattatcaagtgttatatactgtagataattgttaggtgctagactttaatatggctggcagcacagtaggtttgtttacaccagcatcaccacaagcgcgagtaatgcattgtgtggtgacatcatgactgctgggttaccaggtgataggaatttttcacctctgttgtactttttttttttttttcttcctcagttcatgggaagctctgttatactcttatgggaccccgtcatatgtgtggcttagcatcattgaccgaagggttgttctgcagtggatgactgtatcaaattcgccattctaagaaaactggggttccataatttcacatttcatattttattagaataaagtaaagctaatagcacttaaattgtttttgtaagaaggatttaaaaacaaaaaatacaaagtactgctaattgatttatgtaacagataatgctttaacctaaggggtttacatgctaaaaatgacccctttgatgttacccgagcatatatacatttacagatatgatgtatcagctttagaggaggggggaaaataaccgtccttgttattttaaaatctatgatacttgagtatacgtggaaaagaggtgtgattatcatagaatgaacttgaaagggatgaaaagggttgacatccattcacttaacaaatatttgagcacctgttattttattttattttatttttggagatagagtctcgctctgtcaccaggctggagtgcagtggcgcgacctcagctcactgcatcctccaactcctgggttcaagtgactcctacctcagcctcccgagtagctgggaccacaggtgcgcaccactacgcccagctaagttttatatttttagtagagacggggtttcaccatgttggccaggatggtctccatctcttgacctcgtgatccacctgcctcggcctcccaaagtgctgggattacaggcgtgagccactacgcccagccagagcacctattattttctcaatggcttggtagattccagtggagaaaataggatgagcaaagagaaaagtcagatgagggaccagatggacctgaatggaattaacatgtggagacaatagagaaatgattgaatatttaggaggatctttgaagagttctaaaaggcaggccaatataccttcttgttaattttcccttttgtttacaggcatgcatgtagggaataccggattcataaagagctggatcatcccagaatagttaagctgtatgattacttttcactggatactgactcgtaagtgctgtgctgttttaccttaacagttatattattttcttgcaatgctgattgttcatggaatagagctgaactctgggtccaggacataccctctgagggaaccaagtaatttgtgacaaatgatcaaacataaattcagatttggatcagcaagaaacctctaggccaaaggacatgtgcacttgtgtgccagtaaatgtttaacagccagcttggtatgaagagagacagggctaatttatagtgtttgccagtttccgtggtgtagatattcctcctgtgtctaattttgatgtaccacctgtttatttttgtttttttttaaacatcttaattataattcacatactgtatgattcacacatgtaaaatatacagtttagtggtttgtagcatattcatagatacatgcaaccaccagaggcaattttagaattttttcaccatctcaaaccccatcataccttttactactattcatctattccaccattccatccctctgccctagccctaatctgtctgttttatctttatagatttcctattctggaccctcatatgcatggaatcatatagtatgtggacttttattactggcttctttcacttaccatggtgttgtcaaatttcatccttgtagcctgtgtcagtacttcattcctttttatggcaaaataatattccattgtgtggatataccacattttgcttataacggtttgataaccagctcacaaaattcttgaaaatttaagtcagctcttggaaactggcatgagttggtgccagcatgccactgacgtgcactagtgagtgtagactgttcaagagagtttctgctcaccccagagactcttatgaacattgacagacctttttaaaaagtactggccgtgtgattttatcctagactgagataagaaatgtggcactaatgaagacaaggctcagtgctacatgttgaaatacaggctcataggcttataggatgttagaataggaagggatctcagagtccagccttttcattttataggtggattttgaggaccagagaagttaaataacttgtctgagatagttattaattgtgggcattgctatattttgttacttggtataggtaacctcccgtgcctctgggtttatccagcagtttagctggatatatctcagcatttggaaatgtttctctgtagaagtctgaactgaatcagaatataccctaggtctagacttcaggttccctcagcctcccagggtaattctaggagttttggtctgttctagccaacagtctcagatatggctgtgcagacagctgccttacatttagaaataaccccaaagaggactataattccctttggaaacatgacctgggccattctctcagggatttcttctcatttgggtagccctggcactgagcttagccatgtgtgtttcacgtggagtggaatttttttaaaaagatctagttagaaggcaggattgggaaacaaggggcggggcatgacattactgttttgccttgagcaaatttcttgaatactaggtagacccccctctctgaactattaagttcaagaactatttcaaagttaaatatcaggctcaaattatctgctgttttgaattgtatacacacttttaactaatgtgagaaattgagttggttctatactattcttgagttgattactttgttcttcctattgtatgtatgatgaattttcaccaaaaataagtcagaccatgatttttagaacatcttctgagaattgtttgggtattaaaagtgaggctttattttcttttctttcttttgttttggttgttttccttttttttttcctgagatggagtctcactctgttgcccaggctggagttcagtggtgcgatcttggctcactgcaacctccacctcccaggttcaagcgattctcctacctcagcctcccatgtagctaggattacagatgcacgccaccatgcctggctaatttttgtatttttagtagagacagggtttcaccgtgctgggcaggctggtcttgaactcttgaccttgtgatccgcccgcctgggcctcccaaagtcctgggattacaggcttgagccaccgcgcctggctgaaagtgaggctttattttcaacttgcatttgggtgaaagaatcattccattgagcatgagtctatatttcagatttcagaatctcagatcagaggaatctataaatttcagacatttctttttttaattttattttatttgagatggagtcttgctctgttgcccaggcagtagtgcagtggcatgatcttggctcactgcaacctccacctcatgggttcaagcaattctcctgcctcagcctcccaagtagctgggattacaggcatgcgccaccatacctggccaattttttgtatttttagtagagacagagtttcactatgttggccaggctggtctcaaactcctggcctcaagtgatccacccatctctgcctcccaaattgctgggattacagcagacatttgttttcaaatagggtgttagcatgccctgccatgtttcttaagatacataagatattgttcagtttgtggtgtccacaggaccatgtgtgtccatgttcaattgcagtgctttatgaaggcctcaaattgctcagtggcccatagcgctagacctgagtctgtttgctctcagttctgttcctcgccctttcgctgctctgtatctttggggggttagcccgtgtaggctgtgtttatcaggcccatgtgtccattggtgttctgttggtttcagccaatgggaaggcagaaatgggagggggtctccacctcctctccctccccgcaattctagtttcccctgatgaccctgggttctggtttcaccatctcctcccttctggcctgcttgcctgagggtgctaatggcttcctgctgtagatgatctctagggtgcctcactgaccagtttgtcttctcagctcttccatcatctgtatgatcagttccctgaattaaagtctctctgttttaaatgttcaggtggtttttttttccaggctaaactgactgatacacccacattgtcacaacttagaaaacttcaaaacgtattcatccctcaggaatattcaaacagttcaggacaccttacttcagagtataatgccttggaagatagacacgtgacctgtgatgccaccaatggcatatggttttatgtatgggtctgtatgacatattgacataagggaaggaaagagaacccacatacttttgttagaaccatagatactatactttacaagctcttttacaccttgtgtttaagagaaattgtagtgcagtattgtgccaagctgtcagaagacgtagtatgcagtcagtttttgggacgtgggcaaactctagattcttactcattgccagcactcagggttatataaaatgtttgcagtgcgaattgtgtacctagccaaaattgcgccactgcactccagcctaggcagcagagtgagacggagtctcaaaaaaaaaaagagagaattgtgtacttgatcacattctggttgtttagacgtggatgtgtggcatgggtgtgtaaaggagccccttccaagaagatacctagcttaaatacattatagttcttatcagtattcttatagtctagactcaagaagaggtctgccatgggtgaacttgagcacaacagattccaacattgagggtgtggaaactcttcaagagaataagcagtttcttaccagaaacccctcagctaatactgaataaacaattgaagagtattttaaggaacaaagaagaaaggagtgagaagctgatgacctgaagttttcacatgggactaatttaggtagtgttaatctgcttgctcttattccatggttaaatattggtttatttgtctttaggttttgtacagtattagaatactgtgagggaaatgatctggacttctacctgaaacagcacaaattaatgtcggagaaagaggcccggtccattatcatgcagattgtgaatgctttaaagtacttaaatgaaataaaacctcccatcatacactatgacctcaaaccaggtatgtctaacttttaggagacagtattagtgggttttctttggtcttataagtgacttttaatttgataaagttagagaatttcacagcagccaagaaaggctaataacatctgacttttgattgcctgggtaggtgtgggaaaaaagagtcctggccaagcagcactgggtttaggagggcgtgttggattaaatactctggagaaacaatacctttatctttggagccagggcagttcatgatgtaagtctcattaagaaagaactgttgcagcaagttcagttttgtttttttcccatgactcctactacataacagtccctctgcttcaggtctctttgataagagcccccaaattaataacttatttttacttatatgcctcccatttcaataaatttcaagcagaatttttcatctttttgtatggttattatctagctttgatgttcatcagcaaagagtacagggcagctagagtccttacctctattttttattgttatcttcagctgtgttttagaaatctgcatagttctatagacaactctaacagcttagcttgggcattaggaagatggtccacatttaccttctggtgttgcaaaattgtaaactttgctttactcttctggtaggtgcatattgcgtctcattgactattctctaatgttctaatacaattcagatgactaaaacattaattatgatgaagaaattttttaaaagatggctattttgtgaatgaattttccataactgaattcaacactttcctgcaatgggagctgtaggcggtgctgtggtgctagctttggtttccttacatggtttctttgattcctcccccacaccccaagtgctgttctaaacagggtagtttagagatcctcactgaaagttcagatgaaagtttcccatcagttttgaccaagtgaacaagggtattttactttggccagttatttttatttccagagctcatcatagtggtggttttggcacattaagcaggtgattcttggaaaatagaagtttcagcagatgctgaggactctccctgagtatccagagtccagattgcttgattcccaggatttggatgtttgcttttgcaagagtttgagttcagttgtccccttcttatctgctattactttgggtttttctcttaaatcagtaagtctctgcttattcatgaaggtttttattttttaggtaatattcttttagtaaatggtacagcgtgtggagagataaaaattacagattttggtctttcgaagatcatggatgatgatagctacaattcagtggatggcatggagctaacatcacaaggtgctggtacttattggtaggtatccaggagctctgccaggttggctatagagatgtggctctgctatgctgaagtgttgataatgaattaattgctgtatgctatctgctaggcaaaaatgccataaaccaaagcagactttctccccaaatcattactgtcttttcaacagtttgactcttggtatttatattaatttgtcttaatttttctttcctttcttgaaaatccttaagaaagagagcttatatgtgtccaggtatttgaaatgtatgttttttgtacagagttggccttgcaagtcagtagagaacaaggttgctcatgtgtatataaagaatggccccaaaatctttccgtccaaatacaggtctctcttcatgggttaatgggataagggatttgtctcaagagttgcctgaggatgttggactgtagggagttatgaagatcaggatgaaacataactatagcgcatatgaaatctatacaggaaaaagtgactacaatttaccagaagtttatccatgtctgttagccatgatctaaaagtttttgaggcacatttcttcacatctcttgtcacctgtcttcccctagccacccgcacccaagctacctctgcctgccagttttatgcttctatttctgcctactattacctttggccattagaaccataaaagatacctgaaactcaggcctttaactctatggttgtaaaagtgtgttaataaagcttcctcttccattttgaggtggtcacacaagccacatattggtgtatataaagaatggcccccagttttttttagtccaaatacaagtctctcttcctggcttaatgggatgagggatttgcttcaagagttgcaagagaaggctctatagcaccaacggaggggcaacacatgttatttgtaccctagggaaggtggtcaaatcactttatctttggaactgaaaggtcctaggccttagcagagagtactgactgtctgggaatcagaggtagaggaggaagcagaggggcatggcgttcacaacacagcatcagccctgtgctcatcgtgaagcctgccaataacaccatggacacaatgccccggtttctgttgctccttactgcttgtggaaatggtacctgttgtaaaaagtcagtccctaaattaaaactttgaaattacagatttaaaatagaagctgcatttacaatgtttattcactgtggtggttattgtgggctagtgttcctgtcactaagtgatacaaaaatatctgctgctggaaattctagaaacaggtctatacctctgctatataaattcactggaatttggatttgagctttgtgtttgatctttttttttttaaggcacagtttttttgcatttaaaatagttactgctgtagttgcttacctacaaaaattcagtgattagaatttaagtaaaaattatgtgatgctagggattttgcttcaaagtagtctgttgggagaaatggtggagattggccacatgttgataattcttgaagctggatggtgcttacttagggggtcattttactgttctttctgctttagattatagttgagatttttaataatttaagacagggcttctgagaagattaagtgttacaggtttctatgaaggtttgaagagtctccaaattggtagaaatactgtcataatcactatcttcagtatgtcagataaaaataatcctgaagggtataacaaattataagtaactatttgcagtatttactggttacagaattcttctacattgaatactttatttatttatttatttatttatttatttatttatttatttatttatttgagacggagtttcgctcttgttgcctgggctggagtgcaatggtgtgatctcaactcactgcagcctccgcctcccgagttcaagtgattctcctgcctcagcctctcaagtagctgggtttacatgcacccgccaccacgcccagctaatttttttgtatttttagtagagatggggtttcaccatgttggccaggctagtcttgaactcctgatatcaggtgatccacccgcctcggcctcccaaagtgctgggaatataggcgtgagccaccacgcctggctgaatacttattttaaagaagtgacccatagactatgccttgagaataattgtttttttgtatggggattttgattgtgatggaatatgcaactatatacatatatatatatatatttttagcacagtttagtatcatagagctgtcttttactctcctctcaaaatccttgatagtaagttagaatgcttattattttcagtattatttggatgaagaattaatttcattcacttacaggtggagaaactgagacctagaaagggatttgccagacatgtacaatcaagtgacaggtctttttatattctaaaaatcttgctagccaggtgtggtggctcatgcctgtaatcccagcactttgggaggccaaggcgggcggatcatgaggtcaagagatcgagaccatcctggccaacatggtgaaaccccgtgtatactaaaaataaaaaaattagctgggcgtggtggtgcacgcctgaaatcccagctattcggaggttgcagtgagctgaggtcacactactacactccagcctggcaatggagcgagactctgtctcaaaaaaaaaaaaatcttgctaacttatttttctgcatttggatgagttcaacaactcctattctttcctgccactgccataaaaaagtcacaaatatatttaaatggtcattttagaattaaggttatacttatccaagatcatatttaagttatgtatattaaaaaatcaagaactggccaggtgcagtggctcatgcctgtaatcccagcactttgggaggctgaggcgggcggatcacgaggtcaggaaatcgagaccatcctggctaacacggtgaaaccctatctctactaaaaatacaaaaaattagcccagcgtggtggcacacgcctgtaatcccagctacttgggtggctgaggcaggagaatcgcttgaacctgggaggcagaggttgcagtgagccgagatcgtgagtgaagtgggactagtgagaatatttaccactcttaggaaattgagaactattttgatgccctatagggacattactgcctccctaagttagagtgtcttttcttactttgagatgggggtctcactctcttgctggagtgcagtggcatgatcttggctcactgcagtcaacctcccccaggctccggtgatcctcccgcctcagcttcccaagcagctggagctacaggggtgtgctaccaggcgcagctaatttttgtatttttagtagagatagggtttcgccatgttgcccaggctggtctcaaattcttgagttcaagcgatctgctggccttgtcctcccaaagtgctgggattaccacaccccgcctagagtgtcttttcattgactttccatataagtctaagttgactgttaaaattcatatattttggccaggtgtggtgggtcacacctataatcccagtactttaggaggtcgagctgggaggatcacttgagtccaggagtttgagaccagcctgggcaacacagtgagaccccactgctacaaattttttttaaaaactacccaggcatggtggtgcctgcctttaatcccagctacttgggaggctgaggtggggaaaccacccgagctcgggaggttgaggccgtaatgagccatgatcacgccactgtactcagcctgggtgacagagcaagaccctgtctccaaaaaaaaaaaaaaaaaaaacgatatttctattttcaacaagatattttattttgtctttttgtacatgtcttaaacttatatgatcattattctaataatttatatttcttttttgtcccaggtatttaccaccagagtgttttgtggttgggaaagaaccaccaaagatctcaaataaagttgatgtgtggtcggtgggtgtgatcttctatcagtgtctttatggaaggaaggtaagttagaaggttgatggagaagcttgatctctttcttgggtggcacacacacacacagtgccttggtatggattagtctattggagttaattattgggttatacaaaatagaatcctgaaaggagtggtttaaagaaaatacagacttaataatacaagccttattcgtaagcagaaatcctcaaccctagggcacctaatgagttctgcggggctgttaaaaacatgcacttttgctgttctcaattagatctggaacatgtatttattctgatagtgtgtatagggatttacaaaaatcgtttatttattaaagtatacaatcttcccaagaacctgggggccccaagaaccaaaactcaaaatatccccagaatctttatcgccagccatcccattagttgaacctattattaatgaaagcgtgctttatatttctatactggggagatggtgtcaggatgtattcattgttacctctgatcaaggtgacatatttcaacaagtggtaaactacacctaatgaattgtcacatttgtttttccttgtgaacatgccttataaatgtatatattaggatccatttgtgtatttatgttcctattgctgtttttgtgtgtttgtttgtttcagtgtttcccagtaggctgtgggtataagccagatgggagttctgtgtgtcctttgaattcttaatattttgattacattccccagaccaggctcttaattcagattataccttcctctttagcttctccttggtcttttttttttttttttttctatctcacctctctaaaacagggaaactattcagaggtagtaggcttaattattatttacattccctgacaatgttgaattgctgccgataacagcagtagaaattatctagaaataactgtttgagagagatctcagtagaaccagtatagagagacttgagttgaacttgtttttaagagtttattagaaaatggcagctcggtgaccaggcgtggtggctcacacctgtaatcccagcactttgggaggccgaggcaggtggatcacaagatcaggagatcgagaccatcctgactaacatggtgaaaccccgtctgtactaaaattaccaaaaaaaaaaaaaaattagccgggcgtggtggcgggtgcctgtagtcccagctactcgggaggctgaggcaggagaatggcatgaacccgggaggcagagctttcactgagctgagatcatgccactgtactccagtctgggcgacagagcgagactccatctcaaaaaaaaagacaaaggaaatggcagctcggcatagttgaagccattaagtaaccccaactctttctttttcccactctgtccttacccctcttggttttgacttcctttccttctctttttctgttttttgagttggcctgaggcacaggtgtgtatttcttagggccgcatgtatccctcagagcaggtgaggttgctgggtcctgctctagatctcccttttctctggtgtgagcaaagcttagcagagcattaggatataggagatgctgcttctggtccccactctgctttgacctggtagttgaactgtgagcaagttacatatgctctgagctctcaaccccttttatctataaagtgagagaactagaggggattgtctccagagttccttgcagcaattcaaattagaagatgtcttatccttttccttccctggggtattgaattgttttctctataattttcatcagaggcctacattatttgtttgtttttatgtgacagccttttggccataaccagtctcagcaagacatcctacaagagaatacgattcttaaagctactgaagtgcagttcccgccaaagccagtagtaacacctgaagcaaaggtaagttttgtttgacccattggccaacagaaacggctgctttgctttctgtattacttttttgggtaatagtggatggattcttcagtgtgaaattcagcagttaataaaaatattaggataggcatgaattaatgttcctaagaacacttgacagaagaacattgcttacaccctgaccaccccatccccagttccagtagaaggaatgttgataggtgggtgttttaatctggaaaggctccctagagtcagaaagggagggagagcagactccagttgagagagaacaggtgtgtggatgtcacgaaagatacccagcttcatctgtattcagggattatgattaatttggggagctaatgcccatgtaggagaaattatataagagtactaaggcatttgtattagtctgttctcatgctgctaataaagatatacccaagactgggtaatttataaaggaaagaggtttaattgactcagctcagcatggctggggagaccttaggaaacttaggtaaccacccccatgattcagttacctcccaccaggaccctaccatgacacgggattatgggaactacaattcaagatgagatttgagtggggacacagccaaaccatatcaacattatagggttaaacgtcaggtgaatggtaagcagtaaattctgttgcagttggtgagggcataaaaaactcgtgaggcaaaggaaacatggaatgggaagtggtgaaaaggaagctataaataatcactcatccttgccacatctgtaaaccaagattctagtagccagcctactttttccttgctattttatttatctctatttattaaccagttctacttaggtgagtggtagccagccccattgggtgctgtggtcatttagcatttttaaagtcaaagtgagcagttataagtcttttgttgttgttggtttgagacagagtctcactctgtcaccgtgtctggagtgcagtggcattatcacggctcaccacagcctcgacctccccaggctcaggtgatcctcccacctctgcctcccaagaagctgggactacaggtgtgcaccactgctcctggctatttttttgtattttttgtagacaaggggtttcgccgtgttgcccaggctgatctcgaactcctaggctcaagccatccgcctgcctcagcctccaaagtgctagaattataggtatgagccactgtgcccagccagttacaagtctaatctctttcttcggtgtttgatctctgccgttccctcacagtgtacctatgtgacataggttaggaaagaacctcttttccaagtggtttagctgccatgtcacagggtaagaattaacatctttagcagttgtttataattcctgactgatggctccctgtccccattgttcaacagtttaagtactgcataaccaagaaatcaaatctgcaagggagaagtcccatgacacatccctaaggcaaatgctgatttcctgacttgtcctaggagagctggagagaggctcagctttgaagcctggttaacctaattttggtgtcagctctacactcagtagtagctgtgtaactttaggcaagttaaaccttttaagctgcttttccttatccataaaaacagagacaaaaacatcttccttaaaaggtgttagtagctaggtgcagcgctgtgcacctgtaatgtgctatgatcatacctatgaatagccactgcactccagcctcagcaacacagtgagaccctgtctcaaaaaaagaaaaagagaagggtggttgtgaggtttaagaggactggtagcacctaacccttggcagattctctagctagctgctctcactacccatgccacagctgccacccagagtcgatactgagggacttgaatacattgtctggtagatgtttaattctcctaatctgtcaggtttttcaagactatttctttatataacttttgtcaaattttcatgtttattcaataaataggtgaacaaatgtctccaaaactttagagtctgttagatgaacttgttgtgaagaatacagaagtatctccaaatgtttctgtgcattatctcctgtgtccctgtttctcctaatcctaccctcttctcttcctgtcctcccacaacaaatatttactgaatgcctgtgaaacactaagacactattccgggtagtggagatggaatcgaatatgtagcagtgaactctgcagaacagttccctacccttaaggagtttatattccacttatgagaaaaacaataaaacaaaaagtggatacatttcagatggtgacacatgttatgaagaaataaatcagagtagggggatgaggaggtggaaacctctttttttgatggcatggttagggaaggcctcaaagatgaagtgacagtttgagcagtatcttgaatggtatgaaggtgggagccatgatttgcaggagccgttagatctgcaggggaaagtattttagcagagagaagctcagatgtgagaatgagctttttgcaggtccacagagcaaatgggaaggtggtaagagaggcaggagggtgagggtaagtgtgagggaaggcagttgcaggttttaatcagggcaactatgtgagttgattgctgttttaagagctgacactggcagctacagagaaaattcaaggtaaatgaagtttacttggctgagtgccatggatcacacctgtaatcctatgggaagatgaggtggcaggattgcttgaggccacaagtttgacaccatcttgggaaacatagtgagacccatttctacaaaatattttaaaagtagctagatgtggtggggcacgcctttggtcctagctacttgggaggctgaggtagaggatcacttgagcccaggagtttgagagtacaatgagctatgatcatgcccgtgcactccagcctgggtgacagaacgagatcttgtctctaaaaaaagttttaaaaaacagtttgaccagtatttaagccaagataacctgtttaactccaattccttgtctttcacctagaaaggctcatttttaaaggccaaggatcattatgttcatttctatgaattgtttttatcttccaaatgctttaaccaagccagtacctgtaagtctttaattttgaaaaaccagattggcattgtattattaatttgtttatcaaacatgggggaaaaccaaaaaatcagtagcttgattcatgttgtagattttgtttcaaatcaactttgctttttagagcatttttaggctcatagcaaaactgaaagtatagagttcccttataccgcctgctgtacccatgcacagcctccgcatcgatatcccctgccagagcagtccattcgagagagccaatgaacctatctgtaccgacacatcacatccttgtcaccctcatgtaaaatactgagtttctgtaataatgatgttttagatttttttaaattaatttatttaaaatagttatattgaaactgattaaacagaactagctaaaaaataggaagaaagcaagcaggaaaagacagataatctatataagggcctttatgctaagacttacagaaactaaaactacatagcctccatattggtagtcaactggaattccgtgtgcaaccccactcactgcatttttgggtctacagtattattgcagatgcaagtccttttcacgtttccctttacgacatagggaaataattttataacctgtgacacatcatagtgttagtcgttgtgtgtctcctgacacttcatatggtgacagaattttcgcttcctcaggaagttcacatgaggccatggtttgtagatggaggaccgtgaagttagatcgttcccatccaaaccagcgaagacaaagagagattttttttttttctgttggtcttagtgctttgggggcaggagtatttagaggtcatgcttcctttttcctcccttcagtaatggctcagccctttctgtctgagaagggatcggtggcagcagagaggtacttctgttggtgcttctccttcccttgtgttctttgggtctgcctggtgatttctgaggaaggccttaagccccttctctttagttgatatttgctctgggccctggcagccgatagagagccttagggttccctccaggggtgccaagactatctgcctctgtcttcaagaaactctcctttgcaggcgtttattcgacgatgcttggcctaccgaaaggaggaccgcattgatgtccagcagctggcctgtgatccctacttgttgcctcacatccgaaagtcagtctctacaagtagccctgctggagctgctattgcatcaacctctggggcgtccaataacagttcttctaattgagactgactccaaggccacaaactgttcaacacacacaaagtggacaaatggcgttcagcagcgggtttggaacatagcgaatccgaatggatctgatgaaacctgtaccaggtgcttttattttcttgcttttttcccatccatagagcatgacagcatcgattctcattgaggagaaaccttgggcagctccggccaggccttgtaggaaaaggccccgcccgaggttccagcgtcaacggccactgtgtgtggctgctctgagtgaggaaaaaattaaaaagaaaaactggttccatgtactgtgaacttgaaaacttgcagactcaggggggtccctgatgcagtgcttcagatgaagaatgtggacttgaaaatacagactgggctagtccagtgtctatatttaaacttgttcttttcttttaataaagtttaggtaacatctcctgaaaagcttgtagcacaaaggctcagctggggatggtgtttgacttcggaggaaaaaagttgctattgcccgttaaaggcactagagttagtgttttatccctaaataatttcaatttttaaaaacatgcagcttccctctccccttttttatttttgaaagaatacatttggtcataaagtgaaacccgtattagcaagtacgtggcaatgttcattccaatcagatgcagctttctcctccgtctggtctcctgtttgcaattgcttccctcatctcagtagggaaaaaattgagtgggagtactgagatgtgtgggtttttgccattggacaaagaatgaggttagaagactgcagcttggagtctctctaggttttcaactatttcttcacaatttgaacacttgacggttgtcccttttaatttatttgaagtgctatttttttaaataaaggttcatctgtccatgcagtcctcttggattctctgaatgtagtaactatgaagctatgccaaaggtaggcagaaaatgggcttgggagccagacactccagggatcagtagttcctacccatagtctttgtgtgcttgctaaatggtgtacatttcttgttaaccacgttattaaaacttgatcagcacataagctttcttctgttagatcttttggcagcaaacaaccttccccccaagcctctgaattttgtgggtgtgtggtggtgtgtgtctgtgtgtgcatgtacacacacactttgtctagctcactttaaaagattcatcaaatggaattttaaaaataatctgaaaagaaatagatatttcaggccgggcctggtggttcacgcctgtaatcccagcactttgggaggccgaggtgggtggatcacgaggtcgggagttcgagatcagtctggtcaacatggtgaaacgccatctctactaaaaatataaaaattagcctggcgtggtggcgtgtgcctctagtcccagctacccgggaggctgaggcaggagaatttctggaacccaggaggcggaggttgcagtgagccgagatggcaccactgcaatccagcctaggcaacagaatgagactctgtctcagaaaaaaaaaaaaaaaaaaaaggagaaatagatgtttcaaatatgaacattcttttggcaccaattttcttttttaatttggttgtttctgagatgtatgatcaactgaagatggagctgaaatgggagacgggtggccccaccgtgcccttgaaacagcagagcactcctcagtagagagggagggagccaagagcctgaacatgtggtcgccagcttggaatgttactgacatatgtggcgagggcttagccagaaatatttaaagatgtagtattccggcctgtgagttgtctgggcagggagggggagtcagaaagggtagagagctctcaaataactcatgactctagtgttcctttcacatgtgaacagtgtcactgatgacacattttctaggaccttcgtttgttttgtggacctgcctcagtctcctcagtatcaggcgatcttaagggaagatggagtgtttcaaattggagagaagttcatgggtaggtatcgtcctgtggaattctgaatgcaaggaagtcaaccccagaggccttggtacccccagctttctaaaactactttattacaatttatatgtatatacacatgcacatataaacgtgtgcatttatgtatgtgtgtatagtaccttttttaaaaaaacatttcctccaagctgctaagcaaagggtctcacaggtcgagcacagtgctgagaggatggtgtctgcataatgaagacatggatgaagctgagaccgtgttcaaactcactgaaaacaatgaagttctattccttttttcttcctctccaatgatcttgcagttgatttgtttgttttttaattttttaacatttttttaacgttgaaaaaatgctgcgtctttctttaagccttcccagtaacttcctgccttttttttccccgtgggcttttaagtgaagctgcaggattttatctttcaatctgccctttctacccttgtcctattgaaaggatgccctcttcccttgcttttttggtctagggcctgtttggagctaactaggcttggctgagtccgggcaagaccttcttccgaggcatggacaagccccagagaacatgcagaacattgacctttccattgactgtctttcaagcagccagtgaaatcactaagtggggttcttccatgacatattttgttaatatgggtttcactttttccaagaatagtcccttgttgccacaatgttgatttactttacacaatgacagtatgtattaatttgtaattaaacccatccagattgttttagccttttcccaatggggtgggggagggaagaaggatattaaaataagttttaagaagcaaatttcccagcctcttgatttgactctagttctccagcttcacacagggacctgaccacctagggtgcagattgggagaatcctggcaacaggctgagtctcagggcattgcaggcatgggaatgtgttgattcatgcaacacctttggtaccttcaagtgtgccaggaatgatgcttgttggtgggaatacagcagtgaacaggacagggaacgcctggcaatctaggagtcagcagtccgagagtaagggcccaggagggaaggaactgggctcgtgcagtgtgagatgggcagctttagatggagactcaccaggaagagctgtatgtccccacttctgtggcagacctgtacatgtcagctatctaaaaaagggttctatttccctccttccatcattctcattgccgaagctatctgcctcatttcttaaggcagaatcacagaagggttaagagcctagactttaggtttgggtttagaccccacctctgcaagcttcagaaatatctccttgcactgtgggagtaaggagtagagataagatatgtaaagtgcctggcttgctcataagaggggaatcaaaaaatgtggtttaaaaaaagatcacaagatctagtagtggaaccccaagttcactagtgtgaggttcagagccttctactcaccacataccacatgcagacctttgaagagactgcccctttggcttgaggttcagtatcaacctctatcttacaaggccagcaatctcctcttcccctggctccaaaactgcttttggctgaacctgggagaagcatctctatggacaaaggtgtccagcagcgtcagcatcacccgggagcttatagaaatgcatactctcaggtcccacccattcctactgcgtccgaaagagaaggggggggtgcctaacaggctgtttcatcctccaggtgttgctgatgcaggctccagtttgagaacgccactgtaggctacctgactcccaggcgggatgaacactgaagggtaccagtcctgccacccttcctgccagccaactactgcaataagggtggggtcattagagagggtggctatgaggcctcttctgaactcacccacttggaagacaggactgttattttctacactaggaaaaaactccaacgctgtcggctgtccgacagcgtatgatgtcatacatagttgcctttttttttttttttttttttttttttgagatggagtcttgctctgtcgcccaggctggagtgcagtggcgcgatctcggctcactgcaagctccgcctcccgggtcacgccattctcctgcctcagcctccagagtagctgggactacaggcgcccgctaccacgcccagctaattttttgtatttttagtagagacggggtttcaccgtgttagccaggatggtctcgatctcctgacctcgtgatccgcccgcctcagcctcccaaagtgctgggattacaggcgtgagccaccgcgcccggccacatagttgcctttatggggagcacctggagggcccctacaacatatcccttgcacaagtacctaacaatacactgaagaaacattcactcgttcgggcaaagcttctcacccttggccttctcttaaaatataaaacaactatttataacattttcctttcacctgaggggtccagggctgcagaaggagctggctaagacctgggtctgcttatgagtccaccctggcccactggatgagggaggggtgaggagggccagggctggattgcagctctttggaaagctgggagagaagaggtcccaggaagaggaggagggttaaagcggtggggagtggctagagactcaggttgctgttgagttctgtggttgggtagggggaacctgccagaggctggaaaaacaggcaggcctgggagcaggtctgggacctggtgggggcagggaatacaagagggctattgtgctgggggagcccagcaggggtgtgagacaggctggagtcagcaaaggggtgtgtgtgtacatgtgtgaggcgctgggcagaagaccccgtggtgagggggtcagagagcagctggctggctgactgactgactcctgggtgtggagggaagtgcccagctagagagctgtgctgtcctcagccttgcaagcagcctgcagctgtggtggcttccccatgtgtcatccaaggcttttcaccctgaaagctgcttggagagggagcagaggtcgatagcagagagaaggggctctagcacttgtgctttgcaaagaagtttcgcggctgtgttgcttcacaacctagccatatgcaaggtaggggcaacttgatgggttttttccttcttttccattttttttttttgttgttgttgtggaggcaggctcttgttatgttgcccaggctggtgttgaactcctggactcaagtgatccttccacctcagccttctgaattgctgggattacaggcattgtggcactacgcccagccactctctgattttacatgtggaaacttaggcctagagaggtttggtacgagcagtgggtggagcaggagtgactggggaggaagggcctacaggcttgaacattgggtgagctggattctatgagtgccatcttttgggcagaggctgctgtgggtaagggctgcacttcggctcccctccgccagactcccttcactttgtccctcccctgcctcatggcttatggccctcagaagaaatatacttggagactcagccagtgtgggcagcagactggctctgcagtcctgggctggaagtgaacttagatgggaaaatggaggcgtggctttgcagaatgtcagtgctgcctattccctaagccctctctgctcctgtcatgctcatagattaggaagccataagcctgtcctgcccctagaaactgcatcttcctgctccggagtgtcctaattgggtaagtgagaatgggaccctctgccttggcttccttaaggttgctgtaaggcataaaggggttgtgggataaaacagagggtgaggctggtggccacttccatgtcacagtggccccaggagagatgtccagaggacatagatgtcccccagtgggggtcttggcttgtcatagtgtcagacgtgagccctttagcctggctcacatgccctaagagcagggcttgcctctgggcagcacatccaggaaggccttgctcctttgcatctgcaaccctctcaaccctccccacaaccttcacaccaatacccctcctccggcattctctgccacgtcagctggacaaaagtgcccagctttggcatcgtagaacaaggtcatagtacagccctgagtgaggactgcgctcacgccacaactccacaacttgctgtgtgaccttgagccaagcactcccactctgagctacaactgctgcatctatgaacttcatgcatccactcagacacacctgttgggccgttctgttaatgcactgggccaggatttgtgggtgataaaaaggcccctcagcttggctcctgccttaaggaagcttacagctgagaagctgagtgggagctgggaggtggggagttgcgtaagagcgagatgagaccctggggatggagagagggcacggagctgggccttgagagaggagcagagttcactaggctgaggaggggaacatagcagcaaagggtcttagaagcttcacaaacaatgtgtgtcactgcagggcccctatgatctcacacatcctggcctctgccagtgccgttccatcgctttggccgcctgagcatcttggagaactcagcttaggcgtcacctccagccttcctctgggctctcacagcgccttgtgcatctctcccttgctccaaacaccgtatcgtgttgttgcagcatgagctgcccctcgggaagcctgggaccagctgaacgccagtgcctctgaaggggacgtagagccagacaggtggggtgaggcaacttaggtgtgagacccaagaggagctctgggcagtgtgtcagatgcagttcctcagtcaggtgagcagactaacatcttaacatctcaaccagaacatatcccccagcacagggcttaactcatgtgcagtgcactgtgacatttagtgttttactgcactttgaaaatgctggtcaccacccactaaacagctggaaaacattgcagtgcttcccaggtgcccctgtctcctacttgctgctccgctgagggaggtggggccagcctcctgggacagggtggaggtggtgggccagctggatgaagcctcctggctcctgttctggtccaggctctattccgccagaggcctgggcgggaagggatggatcggggaggctctgcatctgcaaagcctggccttccgctgggccaggatcagtgagagccatagaaggctgttggcagggactgggccttgcttagaaggctcaagtactgagactagaggaaacctcaccctgcctgtccttcctgagttggggagacagagggaaaggtcgtggagcatctcgggtgacatcatgaagatgcagagctgccagcccaactacagctgtggctcagaggaggcctggactcctggctcggcctcatcctcagtgcagggacaggctcagaggcattgcggtttcaggtcaggggaggcccttgtagagtagtcagggtgatactgttaccgaattgaactggggtctgcttgcccattgcagtaaaatcaggcactgatgctgagatttgcagcgggaaaaagcatatttattgtttggtgcctagcaagaagaacaggcagctagcacttaagacccaaactccctaaggctgggtgtggtggctcatgcctggaatcccagcactttgggaggctgaggcaggtggatcacctgaggtcaagagttcaagaccagcctggccaacatggtgaaaccccatctctactaaaaatgcaaaaattagctgggcgtggtggcgcacgcctataatcccagctacttgggaggctgaggcaggagaattgcctgaacctgggaggtggaggttgcagtgagccaagattgcaccattgcactccagcctgggcaacagtgcaagacgctgtctcaaaaataataataataataaaataaagaccagaactccctggtggcttacaagcaagagtttttaaagatggggttacatttcaggatagcagaagctgcaggcaaaattttaaaccaagaaatacatggagggtatacactggtctggctcgtggcaaagaacagtggtcagagttcagtccccagctcccccttatctaaggtctgtatagtaatagaggcattttccatctggtggaggtttctggaaacatcacaagaagatatgttaagaggttatcttttagtttctatggggaatcaaaacaccttgtgagtgacttgcttgtgagacgattgttacttagcttcacatttatcagattgctattttatttttgtagagaccaggtctcactatgttgctcaggctggtctccaactcctgacctcaagtaatcaccccaccttggccttccaaagtgttgggattacaggtgtgagccactgtgtccggcttcattgactttttaaggctagctaagtgcctgggatgtcatttaaaagggactgaagacttttcctttatttccatgcttaggaggcccagcagagccctaagtggcgtcctgctccatctcagtgactccctttcctccccgcctccccagctggggagggcagtagaaagttctggggactccatctcactcatgcacaactggttcttcagctcagctctgtgatgccctcttttccttactgcggcgcctcagggcaacctctgtccctctctgagctccccttagccagcttgctcctgacccactcaagcctccccagtggagacaggagccagcgaggatctgagaggcatttgctttgtgacccctgctgcagccggggttcgcagtcctgagccctcccgctttgagcttactccgctggcagctcacagtgttttcgtggtggctcctccaagtgagagtcgatgtccagattcctaggttcatggagaggaaatctgtacttcctgcttcctggaagacactgtgaggtaactatctcttagcccttggtagagaaaaggctgggatttggggtccctttaaaggatccctcttcttttttagacagggttttgctcttgttgcccaggctggagtgcaatggcaccatctcggctcactgcaacctccacctcctgggttcaagcgatcctcctgcctcagcctcctgagtagctgagattataggcatccgccaccacacctggctaattttttgtatttttagtacagatggggtttcaccatgttggccaggctggtctcaaactcctgacctcaggtgatccacccgcttcagcctcccaaagtgctgggattacaggcgtgaggcaccccgcctggcctaaggattcctcttctaatacaggccttgggttggaagtgagtggatataaactcagaggctttcctgggatcggggagcccttctaggtgttctccacagaagggagaagggaaagaacctagagaaagtgggcagaatttttgtcaggttgtaactgtggctggatgaatggtgaggagggctggggtggaccagtcaagagaagacagaccagctataaggttccccagtcatgtgggcgtgggaaaaaatagttcctttaagttacccttggaagaggttgaactagatattgaactatgggtctttctgaatcctgagcctgccttcttccttccctctttagcccagtcccctctaggatccttggtggtgtagacgagggtgtagccagatggacttggagtggattgcctgagtggagccccggggatttgagatgcaggagccagggagaagagagggtgagacccacttgggccagccccacatttggccagtcctcttccctggcttggagaaggtgcagggtggggcaggtcatacagaaccctttggggtcactgcctcttttctagttgcctcaggcaaggactggccaagtcttttttttttttttttttttttttgagacagagtctcactctgtcacccaggctagaatacagtggcgcaatctcagctcactgcaacctctgcctcccaggttcaagtgattcttctgcctcagcctcctgagtagttgggactacaggcgcccgccaccacacccggctaatttttgtatttttagtagagaaggggtttcaccatattggccaggctggtctcaaactcctgaccttgtgatccgcccgtctcagcctcccaaagtgctgggatgacaggcgtgagccaccgcacccggcccaagtctttctttatagcctcctaccctaccaagccatccagttgcattttccctccctgtcttgagttcttctttcctaagcttctgttgtagacctggcctgctggagtgctctgctcccctgggaaccctctggctggagaggctcctgagccacagaaccagagaagaggagagtaatgccagaggatccctaagcacagtgagtaatgacaccaaaacttacacctcacagggcacctgagactcagggaagggaaatgacttgctcgaggacatgtggctagtgaatggcagagccggaactccactcacctccactccccaggcctggactcaccccactgccccatgccgagctgtttatggacacacatttattagccaaagtgagcatgcttcttattagattactttacactttagggtaccatttttgtacacaattaaatatggagatgttcagaaaatgcagggatgttgtattgttttcccaggcaaagtaaaactcaatgttacaatccgataaaactgatatgtgcagatttcatgggcagggtagggtgggagggtaggggagagacaggcagggtgaagggtaaggaccctgatgtccaaatggcaaaggaagatgggagatggaggagaccacattccctgaacatccccattcatccagcggccatgccattgctttacacttaacatttaactcccaaggtaggaaacatctcaagttgccccatttacaagtaagaattattgtgagctcagagttaaagcattaataacttgctgcaggttacaaagctgggaaatggcgaagtcaggatttgaactcaggtttctctggatccaaagtctgtactccttccactaaactgtttgattgattgattgattaaagacaggatctcgctctgttgctcaggctggagtccagtggtgattatagattcactccagtctcaaatcccggggctcaagtacttcccctgtcttagcctcccaagtagctaggactacaggtgcataccaccatgaccacgcccagctaattttaaaaatttttgtagaagtgtggtcttgctatgttgcccaggctgattgttaactcctggcctcaagtgatcctcccaccttggcttcccaaagagctgggattacaagacctgaaccgccacacctggcgtaaactggttttgatgaaattagcagacccacagggggtgatgctaatacaggattagaccattctctcattgctataaagaaatacctgagaccaggccgggtgtggtggctcacacctgtaatcccagcactttaggaggctgaagcaggtggatcacctgaggtcaggagtttgagaccagcctggctaacatggtgaaacccctctctactaattagctgggcatggtggcacgtgcctgtaatcccagctactcaggaggctgaggcaggagaatcgcttggacctaggaggtggaggttgcagtgagccaagattgcaccactgcactccagcctgggcaatggagtgagacttgatctcaaaaaaaaaaaaaaagaaaagaaatatctgaggctgggtaattataaagaaaagaggtttaatttgctcatggttccacaggttgtacaggaagcatgatgctggcatctgctcagcttctagggaggcctcaggaaacttaaaatcatggcggaagggatgcagcagttcacatggctggagcaggagcgagacagagagtggagaggtgctgcacacttttaaatgaccagttctcgtgagaactcactgtcatgagaacagcatcaagaggatggtgctaaaccattcatgagaaatccacccccgtgatccaatcacctcccaccagggcccacctccaacactggggattacaatttgacatgagatttgggcggggacacagatcccaaaccatatcaccctcagtacctgttgctggctgacagttggtcagtgtctaggggagaaccattctcagcttcagttccacgatagcgaataccatcttggcaaaaatcccctggacaagtcagagacctcactaagtctccagcatctagcctgatgcctgacacatactgaccctcaataaacggctgttcaactgtgggcacaggaatggtgaggaggctgtgggcacagaggacgctggcccttctttggaagcagatgaaggtctgggtgttgatgaggggttcctcgaaagtcccatgctgctcacaacacccaacactcctacagactgtgaccatgttctgttgacaactgagcctgcacaggatctttatgcagtagggaaccggcccggattctccacagggagaatctcccagatgtttccccgctttctgccccaaagtcaagatcaaaagcagttggcagctgcagacatcagcagaagtcagtggaacacagtgtggaaccatgtcgcgctggaggaggaagtctcgcgctggaggaggaagtctcacccttgacagagactagaactgggccttagaagcttgaaccaacctctgtccctgcgagagcagcacacttttgtgctcctcagcccttgcgtcttctttgcctggaatatggcaaaacgtttattttcccccactaaatgaggctcctctagggctgcaactgtgtttgcccatctctctttctctagcagctagcacagggctagcagtcggtgcttgttgagccggtgggtgaagagacgagagcacacctcctgtgtgcccggcatggcgggacctggtgccggcaagtggtgggctctctggcctcatgctctgcgctggtgatgtcaaggggtgggcttctgtcctgccactgatagtaggagggaaggccagcaggaaacgccgaaacctactcaagctgctggagaagggggaatccagccctgtttcaggggaaggagtatcctgtgttctgagagcgagagagcagcttagccggcaaatccttaaatccttcagagattacaggattgtgcaagagggaaggccaagagggggacctctgaggcagctccagcatggcctgttgtgtgcagaggactgagatcccagaacatgccacaccaagaagacatgtcccaaggggcagtggagccacagccaccagaagggacctggccctgtcggacctgctgaagctagccgtggagtgcaggggctttgttggtctggctgctaaccaaagggtggctaatgggaccctttccaggggcctctaggggatttcagtgggggcttgcttcgaggctctattaccactggactgtttaccaagagcctcagcctgacagagatgggaagagacgagtgagcatttctgacccaacacccccactgcagagttggggaaacatttacccaagataggaggaataaaaaggaaaaaaattgaatttatttccaaaaaacataccaaggtggacaagataggaaacaatacaatttatattacagttttattattatttaaaaattttatattaacaaaatgagatgggatctgcctatgttgcccaggctggtcttcaactcctgggctcaatctcctcggcctccgaaagtgtgattacaggcgtgagccaccgcacccggcccatattacagtttcatagtgtttttgattactcgtggtaggagaaatgtgtcttctttgcacttggggtctcaacgtctcagtcctgccctatgccccgagaccccaagaggctttcccaaggtcaggcagggaatccgcagagaggcagggctggactccagcatcctgactccccagttcgtgctctgtgctgcagagacctgttgcgtaacactgagtaactgtggattgtctaaccttttatgaaatttccagctggtcttttgctaccggccagcagtccagttggtgggagtgatgatgccggtcttctgagacgtccagtggacagattttccccaggtttctggatgcagccccaacaagcaaaagtgctacactcctgcaccgggaacactgacacaggggtcacgaaaatgctaaaacaagacgtgcaagaattgttgcgctccgcacacgtaacaagggctctgcctccccctcccccaatcttcgccctggtggccaggccctgggctccgccccttccccaccagaccgggggaggggtcctcctcggcatggaggtaggggatgctaggctgctggagacgcccgcagaaagaggcgggatggcggggcggatgctggcggcccgggtctggccacctgggtcagctgcacgcccccgccccgggctggccggacctcgtagcccaggtcccaccacgccgtgaagtttgcggaaagttttgcagttgcttccccgcccgcgccagcgggggagttgtgacgcagcgtctggggatcctggccgggacagaagagagggaaggcgaggcggggagagactgggaaacagagcagcaagagaaagggcgcacgctggggtcctcctggacccggcgtgtcctcctctccgccacccctttctctccctcccgacgctctagccccagacccgcgcctcctccccttcccctcccacgctgcccacttcccttcccctctacccctcgaaccctcctccccggttctgcgctcctccctccgccctccctccgcccgggctgcctcctccctcctcctccccgggaggcatcacttcgtcccgacccggaggaggacgcgagccccttgcgggcggtcatcacagcccagcctcggggctgccacagcgcgttgcgcctgtgcgccctcggtccccgcgtccactgagcgccgcgctcggggatggggcccggccggccggcccccgcgccctggcctcgtcacctgctgcgctgcgtcctgctcctcgggtgcctgcacctcggccgtcccggcgcccctggggacgccgccctcccgggtaaggcgctgccaacttggccaacttcagggcccgggcggggggagcgccgaggcgcgggccgctctcgacttttccctccttttcccccctcttttctccagaagcgtgtgtgcgtgtgtgtgtgactgggtttttaaaactcgtctccgcttttctgaaagcgggggaggagaggggaggaggagcgcgcctagaggtgggggaggacctgagtggaaccagatgtggcgggcggcgggggaggggagcccgggggactccagcagcctaggaggaagcgggtgggctcttgaggacccccgcgcaccgcgctcccggaccacccggcgccggcccgtcctcggcaggggacctgcagggcgcgcccggggagccagggctctctgtccgggagttcccgggcccagtctcctcgctctgccccaggactgatgcgttaggacggctttccaactatccgcgagggttcgtttcccccaccttccccccgccccctgcatctcgtgggcgttgatattttcttttccacacttagtcttcaaggaggcttgtggcgcgcggcatccgccccgcgtgagctcggcagccctgtgaggaggctcctgccactgggacgcagcaacaggctgggcgccgccgtgctgtgatgttgcgtagcgtgggcagctctgggcacactagtggccctccagaggggacagaccttgagcggcaaaagagctgctaaagattttaaaacccaacgaacaggaaacaaaacaaaaatcagaaaaccccaaaactgtgccattctcttcctgctccttattcaggggtaacagtgaagtgtggggacagacagatccctcgccaagaatctaagagttgaaaggaaagatccacttcctgggggagtgggggtgggggtgtctggagtgaccgggggaatcgcccggcccagcttggtcctgctggctgtttaattgggggatggggacagtccgtgcagtgtctgcagttttgtgcaaggaccagacagccccctggagagtctggggcctccagcctggcccgtgcttgctgggttggcctggcgtgacgtaggcacaagacacatatctgccagatgggaaaggtgggggccacggtgacccacattcacaccaaccggagacccccggggcaattctgggcccacctggcattgaatgtgggacagacacaaaccaggccgggtaaccccctaacccactgcagggcggcctcacaggcagttcccctacctcctcgcactcctgccttcctctgctcctctgcgcagggcctcaggaggcaggcggtgggaaggggtggggaggatggccattcccagagctccagagcacactttaaagccaggccctgggagagagttgtggccagagtgctgactcggcctttccccctggagcttttcatagagggggctggaagtgcctggtgagaggcccggtcagggaggacaaggacgcctggagtgtccctcctcctcctggtctctgtgcctggccctccctggggctgtgtccagggatgaatagcctcagagggtccccttcccgttggcactgcattgaccacaccctgaggaggcttggatctgggtggcaggcagtgtgaggtcttccagcagcagctgagcaggaggaggatggagctgctgcaggttccttccctcggaaccgtgccctctgcacagagtgcgcttgcccctgccctgccaaattccactgggccctaccctgggaagcctgttcagagcctctgggccgaattccttgcccgaagagctggcagcccctagtacctggtgaattacgttgttgttgggaggaattcaccagcaccagagaccaaatagcccaggaaatgcatgtgggaggtagggtgtggcaggccagtgctgctgggggcgaggcttatgccaggcagggcaggggctgcgtgtgggcagtttcctgaccaccatgggggagccctgtgtgcccagagcacggggcaggggcagcgaggcggcagtgccttcttggtgcgtgatggtggaatccatcttttctccaccttggtggagtggcccgcggagactgtcactggaaggagtcctctttgttagttgccatattaccgcatttctggagcatgcagtttgctcagccttgagccaagttcttggggaggagggaaggtagagaagagtgtaagatgcatcctctggaaaaagaaaatcgtgtgggagaatgaaacgtggaacagtgaactgcgtagggggcagaatgccattggtgggatgcctgcctgcccagacccacgctcaacccttcatgtgcaagttcccatttcattttgataacaacccaaggagatggttattgttggaccatttttgcagttcaggaaatgaaggctaagaggggtctgatcatttacattggtcacacccctagtaagtgaaaggctggagtgtggatgcttcccgtctggagattggaggcaggagagaccgtatgggccaaagggtggccaaggctgtctggagagaggcaggaaggggccaccaggctgggctcttctggggatgatgtggaagcttgctggctgggccggggagaaggttgagtgaaagaggtgcctgggaggccagaatggggatgggacctgcaagctggctgtggggaaccccaggggacccttggaggtttccgagcagaggaatgaggggatagttgctgggaaaggggcttctgggagctccagggatcaagtctcaaggccatggggtgaggagacctcaggaaatcttcctgtggggaaggtcggtgctgcctaaaggacagggagggtggcatcgggtacttggggctctgaccagagtcagccagaccagctccctacacttctggcccagcttctgctgagtcgtggggttcggaaacttcttactgttcccccacgcaaaactcagttttccttgctccaaccctctggctctctgtgagtcatcagggcccaggaggtgcccagccgagctgtggctagtgctgggatcctggctctcttctgggttcacctgggcaaggtgagggtacatggaggggaggaagaaccccgggttttggcccccatttttcgcaccagagaaatcctggctttctgatgcacgtagggcaccgtgacttggctcaatgagatgatttcggaagtgccatgcagttctcaggcagatattcatttgagttcctcatcagtttaagcatcgaggaggagtcctgttgcactgtccatacccccagagggatggagcgatggcacccacggctgcgctgtgcatgtggtgggcgccgtgctgggtcctgtgctggcagtagctcttcggcacctcccatctctgagcaggtgtcagagatttgcacacacctggcgtgaaaatgttaaagatgttaagggagtcactcaaggctgtgccaccacaccactagaaggtgttaccagtgagattcgaacccaggagtggttacggagcctgaacgctccagtaccatacagcgtttccatcgcatgaagcactgtcagtgtgtgtgtgttaggaaagcctgggaaattctgccttatgtgttctccccgcccccataactccaagccctctaggacacctctcaatgtgtcccaccgggaggactcctgaggaggagggtggagcgagcagccctctgtcacatgtcagcggtctgggcgcttgggtcagccacttccttgtgggtccaggaggcctggaccgagccgcctgcagtgtcctcaggatctctgagggaccccctccaagaaggcattgataagtgagtgactcaaggtgccccagcatggcactccagcttccctgaggtcaaggattcacatggttgttcattcattcattcattccttcagtgggtgtctgctgagctcctgcagaactgaagtagagatggccatggcctattctttatttgagacctccccaccgtgtctccagtgggggtccctggacttggaaggcctgagcactgctgataggaagcgtgtcttcctgttcaggcctacgtgagatgggagggggccgctttcccacgcctgggtcctgtgaatctgggtggggtgggccagtggggtggtgacgcgctcctggagctcaccctgggccctgcagatctgtcactcttcagctaggggttgtaccagtaaacggcagctggatgagggctgtccagtggcacctgtgacaccggggtctgccggggtccaccagctgcagccctttaggaaacagattgggtcgaccccctcaactgcacactgtggcccctcgtggaattccaccggttgtttcccttcttgcacttccccctggcccctcgtctctccttccgccgctgggcaccagcctcttggctctgcactctcacagcgcagacccttccacctgcgctctgctcccctcagcctcccactcctcctgatttctctttctctgactgtgcattctgccctccgcagctctggtttttgttgtagaagaaggaccaacttcttcctagtttccccggccccccatgcctctggtctcttgtcctgccccagctttctccacctccaggcttctgcccacgcacgatcactttgcctggtgtgcctcccctcccctcttctttcccaccttccagtgacccttccttcgagactcaaggatcctggggaggacgctgagggagcctggtccctgcctcttgggctgacctggggtgacgagagacaagcacacagacatggcccatggtgacaaatcccagattggatgggtggcctctctgtttatctccttcccagggatcacctcaggagggcacatgtagggaacactatagccagccttcctcagccttccccagccttccctgaaggcagccgggtgcgaggctgagcagtggccccttcctcctgtagatgaggcaggagtgtgggcatggctggcagtgtttccccccgtcagtcctctggaaatgtaaatagggacagagtcggtgggaccaggattgatggcactcaccagctatgtgacctcaggcagaggctcaagtgtcttcatttataagatgggaaaaatcaatacctcttgtagaggtattataagattacatacaaatgagatcatgaacgtatgagatatgtccctggtacactactgggcacagaataatttcttagcaaacaatactaaattattgctatttttattagaagagaaagggtgggtgaggtggctcatgcctgtaatcccagcactttgggaggccgaggcgggtggatcatgaagtcaggagatcgagatcatcctggctaacacggtgaaaccccatctctactaaaaatacaaaaaattagctgggtgtgatgtgggggcgcctgtagtcccagctactcaggaggctgaggcaggggaattgcttgaacccaggaggcggagattgcagtgagccaagatcatgccactgcactgcagcctgggcaacagagcgggactccgtctcaaaaaaaaaaaaaaaaaaaagagaaaacatgactatcaaggttcccaaatatgataaaacacagtcttcaatatacaaaatcctgctggacacggtggcccatgcctgtaatcctggcttgagcccaggagttcaagaccaacttgggcaacatgacgaaacccagtcactacagaaaaaaaaaaaaaaaaagctgggtgtcctggctcattcctgtagtcccagctactgggcaggctgagatgggaggattgcttgagcacaggaggttgaggctgtagtgagccacgattgcatcattgcattccagcctgagtgacagagtgagaccctgtctcaaaaaaaaaaaaaaaaaaaaaaaaaaaaaaaaaaaaaaaaaatcctaactacagctgtcaccagaaaggaggtccaatccagaccccaagagagggaactcacgcaagaaagaatttgaggcgaatccatagggaatagtgaaagcaggcttaataggaaagtaaaggaataaagaatggctactccataggcagaggagtagcactgacggctcagctgcttatacaattgttacttcttgatgatatgctaaacaaggggtggattattcatgagttttctgggaaaggggtgggcaattcccggaactgagggagtcttccctttttagaccctataaggtaatttcttgacgttgccatgacatttgtaaactgtcgtggcgctgataggagtatcttttagcatgccaatgcgttataattagtgtataaaaaaatgggcagtgagaatgaccacaagtcattttttttttttgagatggagtctcactctgttgcccaggctgaagtgcgatggcgtggtcttggctcactgcaacctctgcctcccaggttcaagcaattctcctgcctcagcctcccaagtagctgggactgtaggcatgtgccactacacgtggctaatgtttgtacttttagtagagatgggattttaccatgttgaccaggctggtcttgaactcctgacctcatgatctgcctgcctcagcctcccaaagtgctgggattacaggcgtgagccaccacgcctagcccagagatcacttttgtcaccttttagttttggtgggatttgggtggcttctatactgcgtgctgttttttcagcaaggtctttgtgacctgtgtcttgtgttgacctccggtgtcatcctgtggcttagaatgcctaacctcttgggaacgcagcccaggagttcccagcctcgttttacccagccccttttaaagatggagttgctctggtttgaacacctctgatacaacttttttttttttttttttaggacggagtctccctctgtcacccaggctggagtgcagtggcacaatcttggctcaccacaacttccaccttccgagttcaggcgattctcttgcctcagcttcccaagtagctgggactacaggcacgtgccaccacgcccagctaatttttgtagttttagtggagacggggttttaccatgttggccagacgggtcttgaactcctgacctcaggcgatccacccgccttggcctcccaaagtgctgggattacagaagtgcaccaccatgcccagccccattgttttttttttaaattgaagcaggtctgaacctgttacttcattgctatttttctctttttttttttttttttttttcagaaatagcctcaatcagaggcattacttcttcgtgacactttgctaactactgtaagtgccaaaaagtaatcatagtttttctgaaagtaaaagaaataccaaagaaaaaaaatcccaccctcaatggtcctaccccctaaagcccctcaatttatcaccatcctctttatcaccttcctcttcatccttacacttctctatttaaccttcatttagggaaggataaggagcttcctgggactctggaataaaaccaagacagactagggaacactgggatggttgggcatacctctcccctttttgcctctagttgcctttagcctactgtctgagggactgcctcccaagggtcatactgatgaggctccctaattactaaattaagtgacctttcttaggcctcaccttgcagcatgcatgctgttcattggcctcaattgtaagaatgggccaggcatggtggctcatgcctgttactccagtgcgtttggaggccacgggaggagagactgcttgaggccaggagtttgagaccagctggggcaacataacaagaccctgtgtctagaatttttttttttttttctgagacggagtctcgctctgttgcccaggctggagtgcagtggcacgatctccactcactgcaagctctgcctccccggttcacgcaattctcctgcctcagcctcccgagtagctgggactacaggcgcccgccaccacgcccggctaattttttgtgtttttagtagagacagggtttcactgtgttagccaggatggtctcaatctcctgacctcgtgatccacctgcctcggcctcccaaagtgctaggattacaggcgtgagccaccgcgcccggccaatttttttttttttaaattagctgggcacagtggtgcgtgcctgtagtctcagctactcaggaggctgaggcaggaggattacttgagcccaggagttggaggctgcagtgagctatgattgcaccactgcacaacctgggcaacagagtgagaccctgtcgcaaaaaaaaaaaaaagtaaaaatgcatgctcagtggaaaacattcaaaccatacacaagtaagtgcaaaaaaatgtgaagtccactcccttacactacactgattacacactagcacaggccacagtctaccactggtagattctgtgggtaatcttcccaaccaagattccccaatgaagattagtagtagttcattgggtaatcttctgatttttttttttttttttttttttttgagacggagtctcgctctgtcgcccaggctggagtgcagcggcgggatctcggctcactgcaagctccacctcccaggttcacgccattctcccacctcagcctcccgagtagctgggattacaggcactcaccaccacgcctggctaattttgtttttgaatttttagtagagacggggtttcaccgtgttagccaggatggtctcaacctcctgacctcgtgatccgcccgcctcagcctcccaagtgctgcgattacaggcgtgagtcacagcacctggcctgtcgttgttttttaactaaagacagagtctcactatgttgcccaggcctggctttgaacttctgggctcatgcgattcttctgccttggcctcccaaagtgctgggattacaggcacaaaccactgcacctggaccaatggacacttttgaaaactctcttcccccggcctttgtggtgtaatttacatccacagtttcctcccttagggtcttcccttccaccctcagtccagagctggcattgctgccaggttagcgctgctaaggggaagcttgaatcgatgtaaactttctgaatttagaatttctgctaggctcggtgactcatgcctgtaatcccagcactttgggaggccgaggcaggcggatcacctgaagtcaggagttcaagaccagcctggccaggtaaaacccccgtctctactaaaaatacaaaaatacaaaatagtgaaaccctgtctctactaaaaatacaaaaatcagccatgtgtgatggtgcatgcctgtaatcccagcactttgggaggctgaggcaggtggatcacttgaggtcaggggttcgagactagtctggccaacatggtgaaaccctgtctctcctgaaaatacaaaaattagctgggcatggtggcacatgcctgtaatcccagcagctcgggaggctgaggcaggagaatcacttgaaccctggaggtggaggttgcagtgagctgagatcacgccattgcactccagcctgggtaaaagaggaagactgtgtctcaaaaaaaaaaaaaaagaaaagaaaaagaaagaattcccggccttctcagtgcttgtgcaggtcaagctgagctccttaccgttcccatagctcccagtactgcccaacccggactctgctcaggctttttttccctgccaggagcaccagcttcccagggggctgtttctgagtcccaactcacacctgtgaccttctgattaccctcagctggaagaagcctttctctccacggctgctctagcattttactgctgtcgtccctcaaacacctccagagcaaggcctttttgtcactacacaggttccagcacagtaccttgtccacggtggcatttgtttttgtttgtttgtttgaaacagggtcttgctctgtcacccaggctggagtgcaatggcactcacgggagcctcgacctcctgggctcaggcgattcttctgccttagcttcccaagtagctggacgacaggcggcgccaccactctattttgttgctcctatttttagtagtgggagggtcttcctatgttgcccaagctggtctcgaactcctgggctcaagggctcctcctgccccagcctcccaaggtgttgggattacaggcgtgagcaactatgaggctggcatttggtattatttagtaaatatttgttgaaaatgagaaaagaaagacaagtgttccaaagaattttttttttaatagaaaggcaatgagagttacccttctagaattttacatgatgccacggtcatgaaaaacatcatatggttttaaattaaaataaacagaaaaaagtccaatgtactagaaaaaaattccagaagtggatttaaactgttataagaaaataatgtgagacacaccagaaaaaacacactaataggaaaaggaatttttacttttaaatgttatgaggatggccgggcgtggtggttcatgcctataatcccagccctttgggaggccaaggtgggcggatcacgaggtcaggagttcgagaccagcctggacaacatggtgaaaccctgtctctaccaaaaatataaaaattagccaggtgtggcgacgtgtgcctgtaatcccagctgcttaggagagtgaggtaggagtatcgcttgaacctgggaggcagaggttgcagtgagccgaggtggtgccattgcactccagcctgggtgacagagtgaaaccctgtctcaaaaaaaaaaaaaaaaaaaagaaagaaacaattagccaggcgtggtggtgggcgcctgtaatcccagctacttgggagattgaggctgctcttgaactcctaaccctggaggccgaggttgcagtgagctgagatcgtgccactgcactccagcctgggtgacaaagcgagactctgtctcaaaagcaaaataaaacaaaaataaatgttatgaggacacctggattataattagaaattttaatttcagtttatagttgatcacacttgaggaaattcagatagcaagctgtcacatagaaagtgcaaggattgggccgggcacagtggctcatgcctgtaatcccagcactttgggaggccaaggcaggcggatcacctgaggtcaggagttttgagaccatcctggccaacatggtgaaaccccatctctaccaaaaatacaaaaagtagctgggcgtggtggcacactcctgtaatcccagctactcagttggggagggggctgaggcaggagaatcacttgaacccaggaggcagaggttgtggtgagccgagattgtgccactgcactccagcctaggcaacagagtgagactttgtcttaaataaataaataaacaaacaaagtgcaaggatcactggaaatgaaggaaattagctttctttaactacttaaactagcaaaaacagaaaagctagtattggcagagctgtgaagaagccaatatatctgactgggggactgtaaattggttctgtttttcaggattcaatctttcggacaatatgtaagaaactggatatgtaagaattcctatcctttgatgtcataattttacttttggtaatttataagatattaatctcaaagataaaaaaaatgttcttagaagtgtttttaagagactgggtctcactctgttgcccgggctggagtgcagtggcacaatcatagttcactacagcctcaaactcctgggcttaagcaatgctcccgcctaagcctcctgagttgttgggactacaggcttgagccacagcctttagtagcaaaacaaattggaaaccacatgatggattatttacgtaactttaagtgacaaatatatggctaatgattctttttttttgagacagagttttgcacttgttgcccaggctggagtgcaatggctcgatcttggctcactgcaacctctgcctcctgggttgaagcaattcttctgcctcagcctcccgagtagctgggattacaggcacctgccaccatgcccagcttttttttttttttttttttttttgtatttttagtagagacgggggtttcttcatgttggtcaggctggtctcgaactcctgacctcaggtgatctgcctgcctcggcctcccaaagtgctgggattacaggtgtgagccaccacgcctggccagctgattcttacaaggaaagttctgaggactgtgagacagtcttacaacatttaatatgcacatactggaaacaagatgcatacctgacattcatctgtccgtttattcattcagttaactggtgtctttgttcattcattcagttaattggtgtctttgtttttgttttctttcctgaacattgaaaacgtaccaggcatggtatttggtgctgccaacaccgtggtgagcaggctaggcatgattcctgctttcctgaggcttgcgttttgaaagcagtcccttcccaatatagagtgccacaaataatctcaaacgtacactgatttcatttgcaggtccacttttttgttttgttttgttttgagacactgtctcgctctgttgcacaagctggaatgcaatggtgggattcactgcagcctcgacctcctgggctgaagtgatcttcccccctcagcctccgcagtagctgagaatacaagcacaccaccaccactggctaatatttaatttttttttttttttttgagacagagtctcgctctgtcgcccaggctggagtgcagtggcacgatctcggctcactgcaagctctgcctcccaggttcacgccattctcctgcctcagcctcctgagtagctgggactacaggtgcccgccaccatgcccggctaatttttttgttttttgttttttgtgttttttttagtagagacagggtttcactgtgttagccaggatggtctcgatctcctgacctcatgatccacccgcctcagcctcagcctcccaaagtgctgagattacaggcgtgagccactgtgcccggcctaatttttttttttttaaatagaaacaaggtcttgctatgttgcccaggctggtctcaaattcctggcctcaagtgatctacctcagcctctcaaagtgctggagttacaggcataagtcactgtgcctggcctgtaggtgcaatttttaagttcattaagagaaaaatcggctgggtgcgatggctcatgcccgtaatcccagcactttgggaggccgaggtgggtggatccggaaggtggaggttgcagtgagctgagatggcgccattgcactccagcctggccaacagaccgagactgtctcagaaaaaaaaaaaaaaaaagagaagaaaagaaaagaaagatggaggcaatcgactgctctaaaaccttagacctagaaacaggaacctgtctgacagtggggagaacgactcccagacaaactagcctggctgaataggaaggactcaacgggaagcagctttgcagtcatcttggtccccaaggaaaggggattctggtattaccccataaaaatttaacctcattcctgaaggatctaagtatgtaagggcattgatggtttgcaaagagcttggaagcactgtttatagtagcaaaaacaaaaatgtacttggaaagagatatggataaattatagaatagacacaatgaaatgtaacacagaggtggacgaatggactccagctatttgcaacaacatgggtgaatattagagacttaatgttgaatgggggaaaagatcccagaggactgcatatggtacaatactctttctcaaaccactggaaaaactgaaaaaataatacagtgggcacccatatactcttcacctagaagcaccagttgttaacattttgccacatttgcttatctcactctctgtgtgtgtgtgtgtgtgtgtgtggtgggtctgtttggtgaaactttgaaagttagttatagacatgacatttcacacctaaatacttcaacatgtaacaactaaaaacaaagacatgctactatgtaaccataatatctaatcacacccaagaaatagagcggatgcaattttttttctcatatgcagtccgtgttaggatttctccatttgtcccaataatgtcctttatagctgttttaaaattcagaattcaattaggtgtcatgtctctttaatctcctttaatctagaatagttgcttggccttgttgtcttttatcggcattgcatttttgaggatcccaggccagttgttttgtaaaacgtcccacagtctaaatttgtctgattgtttactcgttcctggattcatattaaacgtttttggaaagggaactcatgggtgatgttgtgtccttccattctgtcacaccaatgtcaatttgttcccttacgctaactttgaccatttgtttcagctggtgtctaccagatctctccactaaaaaggtcccttttccctttttctgagatgaagtctcactgtcacccaggctggagtgcagcagcacgatctcagctcactgcaacctccacctcccaggttcaagcaattattctgcctcatcctcccaagtagctgggattacaggtgcctgacaccatgcccggctaatttttgtatttttagtagagatggagtttcaccatgttggccaggctggttgtgaacccctgagctcaagtgatccatgtgcctcagcctcccaaagtgctgagattacatgtgtgaaccaccatggctggcctcccctttgtatttagtagataacctaaggaatttgaaccatagtcttaaaaaagcaaagttgttcatagtagcattattcataatagccaaaaactaaaaactagtgccaaactgaaaaccacccaaatgcccatcagcgatagaatggatgaattgtggcagcttcacaaaattgaatattagacagtgatgagaatgaacaagctccagttgcatgccacagcatggatggagttcacaaactgagccagacgctacttcataccatatgacccaatgtatagaaaacaccaaaatagccaggcgcggttgctctcgcctgtaatcccagcactttgggagtccaaggcaggtggatcacctgaggtcaggagttcgagaccagcctggccagcatgatgaaaccctgtctctactaaaaatacaaaaattagctgggcatggcggcaggtgcctgtaatctcagctactcaggaagctgaggcaagagaatcacttgaaaccgggaggtggaggttgcagtgagctgagattacaccactgcactccagcctgggtgacaaagagtgaaactccgtcaaaaaaaaaaaaaaaaaaaagaaaaagaaaagaaaaaagaaaataccaaaataaaagacacaactcatctgtgctgtttgcagtcaggagagtggttacctttagtgcgggagaagggtactcagcaaccagggagggtttcaaataaaatttagaaagaacaacaaacagggaagggatctgtaacaaacatggcaactagctcatataaaactatgagaaaaacgcaggaacctgcaatagttttaaggcaacaaagatcaaaatagataagactataaaagatctgaacggagttcaccaagaggaaatgccagtggctaataagccaatggaaaatgtttaaaatcactagcaaaacaatttcacctctcgcaacagtgccaggaaagattgatataataatatgttcaacgtaacattataattaggaaattctatttataagttaaagtaatagctaggaaatgatgaaatgaaacgtgatattatatcatggaataatatacagccattaagatgatttttacgaatatttttaaggacacagaaaaatccctttgctgaaatgttaagtgaaaaaagatccaaaaatgtttgcgtgtggatatgtgcatgtatatttatgtatatatatgtgtattacatgtgtgtgtatatatatgaatagaaatattttggatgtctagataaaattggtagaaaaaccacagtaaaactaaaagactgtactatgctatctactacataatatattatttaacaggggtgattgtagatgaaatttttctgttttaaacatgtctggaggctgggtgtggtgactcctgtctgtaatcccagcactttgggaggctgaggtaagtggatcacttgaggtcgggagtttgagaccagcctgactgacgtggtgaaaccctgtctctactaaaaatacaaaaattagcaaggtgtggtgatgggcacctgtaatctcagctactcgagaggctgaggcaggagaattgcttgaacccagaagatggaggttgcagtgggccgagatcacaccactgcactccaccctgggcaaaagagaaagactccgtctggaaaaataaaaaaacatgtctggaggcgggatgccgtggctcacgcctgtaatctcagcactttgggaggccaggagttgaagaccaccttaggcaacatagcaagaccccatctttacaaaaaataaaaataagaaataaacatgttcgtatcttgggccatggagtggcagcgggcatcttttgcttgtgatcagtcagtcacgtgaccccagcagcatttgtgtcctgttcccagtaccgtcctgtaattggtcagaggatgagcatgtgactcctcactgccagtcagagcctccctggaaggtggtgtttttcagcacagcccgcagatcctcatttgggacttacgtgagggcataggattcctccacgctggtggtcgagggtcagcctccgagattctgcgggagagactctcaagggtcaccagctggagctggttctgtgtctgcagggaaccacctggtgctctctccattaatagccccctaccgcgagttttctcttctttatctttgtgacttagcccagtgttcacagaaggggaggggtggagggttcaaacgctgtcatacacgtttgcttttcgaaaaacaacaggacacaaaattttataaacatgaaatgacagtacctggtacgtgactcgaatgcaactcagaagggtgccagtaagttagggaattggcctttggaaggcttccttctttttaaaaactataatgtttccatataatgtttgtgtaacaaatgagaaatgggagaccccattatcatttactaacggtaaatttacataaagtaagccagggtcagcatcagataattccgtatagcccatattttaaaccttcacattcctccatttcacagataaagaaattgagcctgagaggctaagagacaggatcacaggagcaaggaatgtgatccaggtctggttcctttgcatggtcctctagaaacattatatacattcatctcaaaaatatatatatatgtgatatatatacacacgtatataatatacatattgtgtgtgtatatatacacataatatgtgtgtgtgtatatattatatatatatatatatatatatatatatattttttttttttttttttttttttgagatggagtcttgctctgttgcccaggctggagtacagtggcatgatcttggctcactgcagcctcaatcttctgggctcaagcaatcctcccatctcagactcctgagtaagcaggaccacaggtgtgcaccaccaactgcagctaatttttttttctgtattttatgtagagatgggtttttgccatgttgcccaggctggtctcaaactcctgagctcaagcaatccacctgcctcagcttcccaaagtgctgggattacaggtgtgagccaccgcacctggctttccctgtaaaaaactttatagagatgttttcatgttgtttcataatgttcttctttcattcaggaatatgtcatcaatgtatttctgcccaacacttctactggctacatagggttctgttgtgtgagtggaccataacttatcccctattggacatttaggtcatttctctgtccttttctatttttttttttttttttttgagacggagtcttgctctgttgcccaggctggagtgcagtggtgcgatctcggctcactgcaagctctgcctcccaggttcacaccattctcctgcctcagcctcccaagtagctgggactacaggcgcctgccaccatgcccagctaattttttgtatttttagtagagacggggtttcaccgtgttggccaggattgtcttgatctcctgacctcgtgatccacctgcctcagcctcccaaagtgctgggattacaggcgtgagccaccgcgcccggccccctctctctctttttttaagagacagggtctcattatgttgcccaggctggtcttgaactcctgggctcaagctatcctcctgcctcagccccaaagtgctgtgtttataggtgtgatgccaccatgctgggcaggtcatttctcattgtcactgatagaagtgtcactgtgtacatcgtagcacaccagactccttgctcagacctgaagtcggatgtggatcccagtcagggtgaaaaggtgcttgacctacgtcaacttcatgcctctgaaggcacccacttctttgctgtcagcagtgtctgctccttggcaccaggattggatggttggtctcatccatctggagcctctcgcagaaggatcttctttggtttacttgtttgctcaccctctccaaatgtgctgggtttagtgtcaaactctgcatatatgagttcaagtcccgcagggttaagtttgaaacaaaggacagatgcacaccatatattccctatctctttttaattaccaaatacattaattgtagcaaatacaaagagaagaaaataaaaatcaacagctatctcataagtcagtcataaccactgttaacacctgggtatgtacagttgttctggaaccctgatgtaccccagaattgcttgggactcttgtttacaatctagatattccatcactccgagattctaattcagtagaactgctctagggcccacacaccggcattgcaaataagctccccaggcgatttggacacccaactttaagaacaagaatgcaaaagcgtctttctagacattacttgatttaaaagaaaataaaaatgaagttatactatatattcattttttctttttctttttttttttttttgagacagagtcttgctctatcgcccatgctggagtacagtggcatgatcttggctcactgcaacctccgcctcctgggttcaagtgattctcctgcctcagcctcctgagtagctgggattacaggtgcatgccaccatgcctggctaattttttgtaattttagttgagaaggggtttcactatgttggtcaggctggtctcgaactcctgacctcaggtgatccacccgcctcggcctcctgaagtgctgagattacaagtgtgagctgccgcgccctgccatttttgctttaaaaaaaaaatcagcaatagaatgtgaacttctgtgtctaaataccctttatacatttctgttgtgtgcatagtattccattagacgaatatatttccatttacttagtcaacactatattgttggacattagttgctcccccatcattgctattgtaaataatgctgtgtggctaaatctttgtatacattcttagttctttccttaagttaaattcctaggaaatgaattctggggtgaaagttttcattcttttgaaggtttttgatagatgctgccaatttttccagcaaaaaggttgccccactggggctgctactcccatgagctccctttgtgaggagccgtgaggtgagatcttcccatccatgatctcagccatccctgccaactacccagcgggcagcacgaggtacctgctcagtggtacctgctaagtgctcagtaattggtctacgcagtggacaggaggagtgttttcttcactgaccagaggaggacactgagagtggaggggtcaagtgactcgctcaggaactgggactcaaagccagctttgaatctagagcctgagttctcttcaccaccccatcaatttttaattgatattagagagggaagaacaggccgggcatagtggctcacgcctgctatcccagcactttgagaggcccaggcgggcggatcacttgaggtcaggagttcgagaccagcctggccaacatggcgaaaccccatctctactaaaaatacaaaaataagctgggtgtgatggcacacgcctgtaatcccagctactcaggaggctgagacaggagaatcacttgaacccgggaggcggaggttgcgtgactgcgcaagggtcctggtgagggtcccaggtcaactcctcccgtcccagtgtctgccaggccaaggggtgtgggcgctgccccacctctttccacactttcccttccagctgcgttgtgagtgacctcattttccctttacagctgcccttggagtttatttctgcagaaccggaatgtggctgaaagagtgcacaccctatctgccctgccctagcccttccagagagccccctacttttccctgacacaccctcctcttctccttgcatctccctcctgggagacctgaggaggggtccagagttcaaagacagaaacatatggtggtggcaagggactgggcacccatgggaattggggtcgggggaggactttgcatctggaccgtgggtttatttttcttttaattcttctgaagagcagcttaaacactggagtccttggccgtatttcctcttatcgtttcttcttatccagattgcagtgtctgctaagcctggttcccaggctctccgctgtgaaacacaaacagattcttgagctcgctgcccaaaactgggcagaggttcttgcttaaatatcaaaagcagtaatggccttccattactctgtgctccccaggtacagagggacaggaagccttctctccctttgtcctcccagaaacccaggagacaggtcttattcgtgtccttcccaaatcgaggcttgcggaagtgaggcagccaatcccagggcccaagggcccaagcagaggtgcgaacctgggtaggtccacattctagagctgccctcccaagccctccaccatggtgcctcctggaggtgggggcaggcccggctgatctgtcgtcacagaagttggcaggtgctcaatctttggctagaattttaaagggagatcttgaaggttcccaagcaagaaggattctaaattcacttgactttaaagagtgccatttgggcgcagtggctcatgcctgtaatcccagcactttgggaggctgaggcagatggatcacttgaggtcgggagttcaagaccaacctggccaacatggcgaaaccccgtctctactaaaaatacaaaaattagcgaggcatggtggtgggcgcctgtaatcccagctacctgggtggctgaggcaggagaatcccttgaacccaggaggtgaaggctgcagtgagccaagatttcatcactgcactccagcctgcgtgacagagagagactctgtctcaaaaagagtgccgtgccttgcttttagaaccaaacaagtgatctttgaatgttgccatgtcaggagggcagggaattgccaatgtgtggagcaacagctcattaggaaacgtgccttgatttctcagtcatattgtgctgtgcttcaaatgtgtctcatgtctcctatgcagcgtgtcacagtgtcatttgacatcaatcatgttggcagggcagcagaccccccccgccccaccgatacatacattttttgttttgttttattttgaaatagatacagccttcttgtcattcttttttttttttaattttttttaaaatttttttgagacaagagtgtcgctctattgctgaggttggagtggcactatctcggctcactgcaacctccgcctccagggttcaagtgattctcctgcctcagcctcctgagtagctgggactacaggcacccgccaccacacccggctaagttttgtatttttagtagagacggtgtctcaccatgttggccaggctggcctcgaactcttggcctcaagtgatctgcctgcctctgcctcccaaaatgctgggatcacaggcatgagccaccatgcttggccgtcattcttaatagacaccaggatactgaaaaatgctttgccactcagaaaaacaagggtacaagcatgatactatatggccactctcattccacttcagtgtgtgtgtatggtgggggcacaaaagggatgggtggagactgtggcaaaccggtgagcccacacccctcccaggtgggcagctgcaccagctcttgtggctggcaccctgcaggcatgctgcctcgactggaaatctacatttttatgtgtaatctctctcacacatcctgaagccaaacacaacttgcctgtgggctatcatctaaaattcggaggctagctggagtccgctctggaataagtctgcctggccatccttcccagctcttccccttattaactgtgttatcaagatgttaatctctcagttatttaatacctcagtttcctcatctgtcaagtgcagatcagaattttgcctacatctgagggttgttataaggattaatgaaaagccttggaacccactgtctggtgcctggacgcgcatggttaatgcctggcattctttgtgtctctttttacaagcgcagggtgaccacaggtcccagtttgccgggggcaggcctggttcatgcttgtggtgctggtgtaatgatcactaacttgccatttcattgtcggtattgacgtaaatgatatgatttgcctagagaagcaaatactggcacagtgctgtttaggactctgatgaggtttagacctaatagaaaggccatggtccaggttccttgaacatccctggacaagtcacttaacctttctgtgttcagtttcccgttctaaacgattggcaagatgaattctaagatccctccattcacagtcattctgtcatttgacaaacatctttttttttttttttttaaacgcagtctcgctctgtcgccaggctggagtgcagtagtgcgatctcggctcactgcaacctccgcctcctgggttcaagcaattcttctgcctcagcctcccaagtagctgggactacaggcgaacgccaccacgcccagcaaatttttgtacttttagtagagacagggtttcaccatgttggccagaatggtctctatctcttgacctcgtgatccacccacctcggcctcccagagtgctgggattacaggcgtgagccactgcgcccggccgacaaacatctttcacaagctcagactcatgccaggcaaaggtccagggcatggagaagccaggggcagagcctgggtcctcagtgggcacttggccagtgaaaacctccagtgcaggttgttgggaatctctaccttttttgtcaagtgttacttgaaagaccattaccaagaaattgaattgaaagttaatttttttctccttctttacggagacgagtttcactctgtcccccaggctagagtgcagtggtgcgatctgggctcactgtaacctcctcctcccgggttcaagcaattctcctgcctcagtctcctcaggcatacaccaccacatctgccaccatacccagctaatttttgtatttttattagagatggagtttcaccatgttggccaggctggtctcaaactcctggccttaagtgatccacctgcctcggcctcccaaaatgctggaattaaaggcgtgagccaccgcgccctgcctgactgttaatattttaaacctcagtttctcaggaactaatcattctggttgaatacattttgctacacatttcttttgtttgtgggggggtatctaagttgtttttttcttttaagtcagaaaacataaattttcactatggaaaattgtaaattacagaaaggcccaaagattttcttcatttctgctgactcttcaatgaaccagaggggcacgtgtaatatttccgctttcggttactccccaccccacacaccttgtagacactttgtcaaaactacattttaaaaaaatgctttcccccaaattcgtatggatgtctcctaataaagtcacgcagtcactcactggttcgtcctcaatcaaccaggcgtggagtcctaacctgtccatgattttaagaaagggcaggcgcacaacacccccgcacggagaaatgaacaggtgtggctcggcagaggccttccgcacctgcgttatggagtggtggccgctgtcggcgatggggtccccgcgagggcacaagtgatcgcgtggccacggcgaggctctgcctccgcccccgcgctccgggtcccattcccgaattctgccctcagcggcctggtcaatgaggttggatcgttggcccagaaagccacttcctgccgcgactggagccagccgtcgttgtgaaaattccccccacggggaaggaagtggctcttgggctgtttattttggctgcgggctagcagacggcgccaggggcagcggccacgcagaccgggcatttgtctagctgggcgggaggcggcggagcgggaagtgccacagattgaggggcgcacggcggtggagggaggggcgcccagtggagagggggctcacggtgacagaggaagtggcgccgcttgggggggtgcacgatggcagggggaggggtgctcggtggagggaggggcacacggtggcggggggaggggcgtgccgcagattgagggcgaacggtggcttggggaggggcgctccttggagttgggggcgcacgatggcgggggcaggggtgccccttgggagcagaagcagagaagactcggaactccaagagcaggtggatctgggagccccagatcctgggcactgggttgggggagaaaggggtcaaggtgtgcccgcccccgggatgctcggactctggggatccaggcctggtgacccccggtgaggaagagccagtgggaggaaagggccgggcgctgcccggagcagaggctggaggcgagagcgattgctgcttgctgtagcgcggccgctctccagttcctccggcaaggggggcctgggggaggactggccgaaaatactgtgatgctttggtctaagacaaaagccagcaggggatgagatcaaacaccatgacactgcgaaggggaaggccagcgcgggtgaggatttgccttcccagagaaccccaggggcggggctagcttccactcagcccgcattacccccacccccgcccccacccccggggcggggtctggaggatcagcaaaaccgcgggaaaggtgacagtcgccttccccaccaccgcctgcatttagtaggtggagggacagtcccacctctccacccattccctgccagagtgtgatttaatgtcttcctagaacacaggatatcacagtctgcagcacagagatttgaagtggggagaaaagcatctctggaaatgactggtgggggaagcccgccactgctctacaaagggtggcctgtgacagcaacagcgcaacactgggactgtgtgtgtaggttttaggcacaagcactttaagctgtgggaggaaagcagtttggcctggctgggatggaggggctgttggggaggagggaggagggtgtgaaaaggggaaggtggccggtagagggaaacccaccatggttcaggatgtcggtggggatgttgcacagttgggcggggtattgggcttcgatatcatgtaacccccgtcctccatggaagcaatgcccccctcgtccagcccaggatctaatgtgcatgcatgtacgtggacacagtctctagccaggggtggtgcagggtggggtgctgggtccccagggttggcctcttagcagggtggggctggcagcttctgctgactcaaggacatttccaggcctggcctggaggttaagcagctcattgaaaacagctgctcctcttggctggcggccctttcaggcggcctctggctctccctgggatgacccctcgcctctgcgtggcctggggaggggcagtgaagggagagaggctcagaggctggaggccaccctgccatgccctcagggatggaactgagtcccctccagggctggccagctgtcctccagcccccagctttccaggagctaagccaggtggtcgctgggccctgcgttcctgcctgcagcctttgctcctgcggttgggcagcttggaccgccttccttgtccttggaatgccttccttgtccttgtctctgcttgtgcctttcagggttttatgtgacatgcctctcattcaacacatatttgttgagagtccgctgcatgccaggcaccatgctagaattaacttctcatctgcctccttcatctgtgatgtcttgtggagagcagccgtcttatctgaggtcagacctctggctgcctctgtggatgggctgagtccggggaaactgcagcaacagctgagggttttgctccagagacacaaactgttgtcaagcctttgcactcagcctcgcgacttcaccaaagcattgtgtgccttgaagcagacaggacgggagaggaggcctcagtgaccatcaaggaggaaggagatgggttactcaatgtagggcaaattgctttaaaacccagttgcccatgagcacaggcatgtttcccaggtgatgacctggatgtctgagaaacaagaagtgtggactacatcagaaatattcctatcaaactagacacggtggctcacacctagaaatcctgcactttggaaggccaaggtaggaggatcaggaggttggggccaggagttcaagatcagcttgggcaacaaagcaagactccgtctctacaaaaagtaaaaacaattagctggggctgcgtgcggtggctcacacctgtaatcccagcactttgggaggccgaggcaggcggatcacgaggtcaggagatcgagaccatcctggctaatgcggtgaaaccctgtctctactataaatacaaaaaaattagccgggcgtggtggcgggcgcctgtagtcccagctactcgggaggctgaggcaggagaatggcatgaaccccaggggtggagcctgcagtgagtggagatcgctccactgcactccaggctgggcaacagagcagactccgtctcaaacacaaacactttgggaggccaaggtgggtagatcacgaggtcaggagattgagaccatcctggctaacatggtgaaaccccgtttctactaaaaatacaaaaaaattagccgggcatggtggcgggcgcctgtagtcccagctactcgggaggctgaggcaggagaatggtgtgaaccctggaggaggagcttgcagtgagccgagatcgcgccactgcactccagcctgggcaacagagcgagactccatctcaaaacaaacaaacaaacaaacaacaattagctgggcatggtggggtgcatgcctatagtcccagttattctgggggcttaggtgggaggatcacttgagcccaggaattcaaggctgcagtgagctatgatcatgccactgcactccagcctggacaacagaacgaaactctgtctctttaaaaaaaaaaaaaaaaagaaaaagaaaagaaaaaaagaaagaaagaaatatttctatcacacttcatttatctggaaagttcatttctatctatcaccttcacccccaaccgtgcagacttaaacttttccatggattgcttcatgagttcagcctctccagcttcattataaacgcatgagggcagaggctgtatcttcttttgattcctaggctggaatgcagtggcgtgattatagctcactactgcctcagactcctcggctcagttattcctcctgcctcagactcccgagtagctgggaccacaggcacatgccaccacacctggctaatttttttttgagatggaacatcactctgttgccaggttggagtacagtggtgcaatctcagctcactgcaacctccgcctcctgggttcaagcgattctcctacctcagcctcctgagtagttgggattacaggtgtgcgccaccatgccccgctaatttttgtacttttagtagagatggagtttcaccatgttggccaggctggtctcaaactcctgacctcgtgattcacccgcctcggcctcccaaagtgctgggattacaggtgtgagccaccacgcccagcctacacctggctaatttttaaatttttttgtagagacgggatctcaccatgttacctaggcttgtcttgaactcctgggctcaaacgatcttcccaccttagcctttcaaagtgcagggattacaggcatgagccactgtgcccagcatctggttcatttttaatttcccttacagtgcttcataaatgattatcatctgtatgggataagaaagcccccaagggagcagccagaaggatgattaggagaatgggctgagggtccagcctccaggcacctcctctgacatggccttggtgctgcagccgacccaagaggctggtctgacaggtcagaggaggtcctagagcagtaacctcccaggaaataaggagaatgggacagaaacccaatgcagacaagctaattaaaaaaggaatgcaggagcccagctggctgcagatgatcctgagtgtttcacagaatggaggaaagagcctcagggattcagggacaggacatccagcatctttgggactcacttcctctctttccatctctttgtcccgtttcactctgcttctctttatatattatcccctcatcgtaggaagcatggccattggcagccccagcctagcaatcttaacaaaaagggaaagctttatgtgttccaggggagttctctgatcagccctgtttgagttatgtgccccatcactgtggccaaggggatagacactgtcatcagctcaagagtgagccttgtgcccacccacacatccacatagccagaggtacacaatacaaggagaacaagaaggggatgggaagtttcctgggcagataaaggcagctcaatgaggtcacagattgttatcgttgccatgtcttcattgtagagcccagcgccctgccagaccatatggtgataagggctgggatcatgtctatattgttcacaataccctcagtgcctgatgccctgctggcatctatgaaattctcaatacatcattgttggatgaatgaatgaataaatgaatgaatcacacccagccagtgctcagtgcacagctccctgcctagcttcattcatttctccatttactcagtaagaacatattgagccacagcttgatgcgtagcactgtgctaggcatgggttgattgcctacaaaatgcaagaagtggtctttgtccttggggaggagaatcccaagatccttgtgaggggccctgcaccttctgtggggggcacttttgctccctgcactgacacctgatgctcccatgcatatggatgaggctggggggtgggtgaggctggaggggccctctctggatgggggtggggggcatcaggcctctgcactctgagctccctctgcccgctttgtatgtgcttgatgaagcacgggtacaaagaacacagagccagctctcaggacgccttttctctttccccagcagttccagcccagcctgagcgtgcactccccctccactaggccttggagaaagagcctcttttcattgagggcccaggcccaccggccacttcgggtggaaaatgctctcaagaaccccctgaccccggcttggcagagtccccccggatccacctacaggaatcccccctcagcttctcctttgctttgcagagctcctgcacgcctctcctctgctttttgattcctcagccttttctcatttgctgccaaatgagaaaatgcaagaggttgcctttgtcctcttttgctgccaaatgagaaaatgtgacctgtgttcttcagtgcctcctccacattgcagtcttcagatctctgcccagcggagtctctcggcccttgggaggcacagagctccttgtaacgcccccagacacctgggattttaaaggtttgtttgctcttatgcccggcatttctcctctaactggattacaaatcctgcgaggggagggacggtgctgcgagtttccttgtggtcccagcattgcctggaacatgccatgcacctagcagaaagttgggtggatttgaacccagagcctaggatgtcagagggaggaggggccttgaagctgtgcctcatgtgacaaaggaggaaactgaggcctgaaaggtacttctgttggacattctaatcccgtcccctttctggacttcagtttcctctgtcaagtgaggggaggttggcctgaccctgggaaaagcccctcccgactaacctggacctctttcagacccttcattcaccgtttgctacaactgctacagcccacctggcattgatttagcacacttgtggattttctggctggggaggagaggaagataacgtcctcttgggctattgtgggctcacgtgaagttttgggcttcgttttccagtcgtatctctgagaaacatctacaaaacaagcaataatttttttccttttccggccccaggcccctttggctacctcctgccaaggccattttctgttactactgcctggagtagagtttctgagaaccagatacctactccttaaaggaagcttgggcaggcatggatcaagtcctggagctggtttctggtttctggtgggtggctgaaaggtgacctagtctgtttgggttgttataacacaataccgttaacagatggcttgtaaacaatagaaatgtatttctcatggctttggaggctgagaagtctaagatcaaggttcctgccgattcaatgtctggtgagggccacttcctcgtggacagctgtcttctcactgtaccctcacatggtggaataggtgagggtctctctggggtgtcttttattaggacgctcatcctatccatgaaggctcttccctaatgacctaagcacctcccaaaggtctcacatcctaatgccatcaccatgggggtttaagatttcaacacaggccgggcgtggtggctcactcttgtaatcctagtactctgggaggccaaggtgggaggctcacctgaggtcaggagtttgagaccagcctggccaacatggtgaaactgcgtctgtactaaaaatacaaaaattagctgagcatggtgacgcaggcctgtagttccagctacttgggaggctgctgaggcagaagaatcgcttgaaccggggaggcggaggttgcagcagtgagcagagatcgcgccactgcactccagctggggcaacagagcgagactctgtatcaaaaaaaaaaaaaaagctttcagcacatgaatttttggaggttgacacattctgttcatggcaggagggaaggagcaggttcaaggcaggggacccagagattagctgtggcagttgtcctaggggtactttaggaagctcactttgtcctgcccagagaggaaccccatccaagtgctgttagaggacagaggggcagggtccctgccccaacctacattcccatggtggtgttttgagcatcagtgacaggagctgtgggtactatgttttaggaaaattaatctggctgttggaacaaggagcagaaagataggctggttgtttgtgattattatctaggcatgaaattcgttcattcatgcatgtgttcatttgttccttcagtatttaagcatcactgtgtgtcaggcagaactgtaggtgctggggttacagtggtggagaagacagaaaacaagagtgtcagatagcgagttctggttctggaagtggcagagtagcttgtgtcagtctaactctctggccaagaatgcttttagactaagggaaaattataaaatatggtgattatggtgatttgaaggcaatgaacagcaattaaaaccagacagaggtagagaggaaaaaatccttgaaagtaaaaagtaaacctggcacatttaaccagcttttccctgaacacactacctggtttgaggagctcatacagaaagtggcagttttaccggttagagcttggggccactagaaaggctaacattgagaggaaatgttaggaaagcaaggagccatagaaattccttctacagattctccttaaatccttggtgactcctgaactgtgcatttgcagggtagggttctaagcagcccagcaagaaacagcagctgggaggtagaggtttcagttgctatctggtgctgaggaaacagagtttaaaatttaagttccaccaagtttgaggggcttagtaatcacctaaggttttcttttgaaatcccagaagggcctcaccttatgattaaatccaaggttaagagccacatctgaagactaaaggcaaaactcaaacaaccccaccctagcaaagcttaaaaccaaacctccacaagagcaaggtaatccactggtaatttaactgcctgccataacaaaatccagcattctttagaggaagatttttttaaaatccagattccctttaacatagcatccctgacgttcagtatacaacaaaaaagtccagactccttatgacattatccacaatgtccagcatataataaaaatttgcagatagtaggcagcaggagatgacccataatcaaaagaaaaaacagtcaatagatgcagatgcacagacaacccagatggtgaaaaaaatcagataataaatgccatgaagagcattataatcaagtgatatgatagagagtaactgtggtcactttacgattgggaggccaggaggatctctctaaagatgttacccttttttgttgtttgaaatgtgaaatgccaggtagaggaaataatgcataggcccagagataggaaacagccaggcttgttcaaggaagaacaaggaggtcaaagcgacttgagcaaggtggagtaacaagatttgagatcaggccgttagacaggaccagatcatgttaaattgtggctcatagtaagaggctgaatctcatttgaagaatgatgaattatctttgaagtaattcaagcaggaggaagacttacctgccttctgttgttgttgtttttttcccttttactatgagcgaggctgtcatttcaaatatttaagaggcaattgcattttcttcttttgctgtctatgcatatctcttcttcattttctactgcattgttgatactttccctaagtttcatgtatctatttttttggtagaagctcttctttcttttcttttctttccttccttcctttctttcttttctttctttctttctctttctttttctttctttctctttctttctttctccttccttccttcattccttccttccttccttccttccttccttccttccttctttcttaagactagtaaagtcagaaaggaggaaagagtagaacaaagactttggtctgtaactgactatgaacaaccaattgagataactcaccatctttggaccagccagaggctcttttaatattgtggacttaactatttgcctctaataaggcacatatatttttgtcatttatttgaattttgaccttgctgatggcatcatatgttggcattaaaaaaatctttttatgggaaaaaagttcttatgctattgaattcatcagtgttgtctatgaccttcaacattccaataatatttttaaattttttctaggactgatttatatctttaaaagattattctaggccaggtgcggtggctcatgcctgtaatcctagcactttgggagtctgaggagggcagattccctgagctcaggagtttgagatcagactgggcaacatggagaaacactgtctctactaaaaatacaaaaaaattagccaggcatggtggcatgtgcctgtagtcccagctactcgggaggctgagacagaagaatcgcttgaacctgggaggcagaagttgcagtgagccaagattgcgccactgcactctagcctgggtgacagagcgggactctgtctcaaaaaaaaaaaaaatagattattctgactgtctttggagaatggactataataggatgatgagatcagcatcggggaagagagagaacttgagatttggacccaggagatgagggccacatttcagctccttcccttaacaatcttacgactcttgtcatcaaattgcttcaccaccctcagccaatttctttaccaataacatagcataatgctgatttatagtcttcttactgtgccagatcctgttccaaatgctttacatgtattatctcatttcatcgttaccagagtcttaagatgaggaaacggcatagagagatgaagcactttgcccaagtcccatattcagtggcagacctagaatcgaagcactagctgccgggcacggtggctcatgcctgtaatcccagcactttgggagaccaaggtgggcggatcacccgaggttgggagtttgagaccaccctgaccaacatggagaaatctcatctctactaaaaatacaaaaaaattagccaggtgtggtggtgcatgcctgtaatcccagctactcaggaggctgaggcagaattgcttgaacccaggaggcagaggttgcagtgagccgagatcgagccattgcactccagcctgggcaacacgagcaatagtccgtctcaaaaaagaaacaaaaaaaagaaacaaaagaaaataaacactagcagtcggattcatcatttcaacacatgaaaagtatcctggggagctagtggctagtggatgcaaaagttctttggagattggatgtactccatatgtgtgttgtgtacataagtggcagtcagggaacaagaggaaggtgatggatgtcacagagatctgggtttgcttactgggcgtgggacactgggagtaggtcacttcatgtctctaagactctgtctgtcttttcttaccttccttccctccctccctccctccctcattccctccttcctaccatccatccctccctccctccttcctccctagtttcttcctttctttctctttcctccttcctaccctcccttgctccttcctttctttttcttcactgaaacataactcacatatagaatttacccatttaaaacatatatttaattgggatttagttttttcacagcattgtgcaactatcatgacaatctaattttagaacattttcgtcatatccccaaaagaagcaccgtgccctttagcagccactcccctttctcgtcacccacaggcaaccattaatttgctttctgtctctatgcattgaagcttcatttcttactctgtaaagtgggtgtgctgtggtggggggcaggttggatttcccccagtgacttctacagagggtgcctgctcagcgaggagataggtggaaagaggaaaggttgaggaagccaaagaattaaattgctgcgtaaaaattaaggcgtgaaatagttcaggggtgggatgagtggtctgggaagatcctagaagaaggaaaggatggaaccagtgcaaggggcagggggaagggtgagacacaatgcctccggatcaaaggagaattttggcagaaaaaccacgccatgtaatagagattgagattgaggttgcaacgtggtgtgtggtgtaaatgcctccactcctcctcataaaatcttcagaaaagtatacaggtgatgtgccgggtggagttgggtttgctttttttttttttttttttgagacggagtctcgctctgtcgcccaggctggagtgcagtggcgggatctcggctcactgcaagctccgcctcccgggttcacgccattctcctgcctcagcctcccaagtagctgggactacaggcgcccgccactacgcccggctaattttttgtatttttagtagagacggggtttcaccgttttagccgggatggtctcgatctcctgacctcgtgatccgcccgcctcggcctcccaaagtgctgggattacaggcgtgagccaccgcgcccggcctgggtttgcttttgagggtggtacagaggactgagtcctccctcctggtgagcaggggctagaacagaggtagtcctgcaggcctctgcctcatctgggcacaagggcttagcactgccactcatttccacctcagagggttggtagtgagtaccgagtgatttaacgtatgagtgacggctcaccatcctgcactgggcacatggtaggtgcctgtcagccacaccggtcatcaagggccaaccaggagagcccctgtgatgccttcgtgtcttgccttcccttccagaacccaacgtcttcctcatcttcagccatggactgcagggctgcctggaggcccagggcgggcaggtcagagtcaccccggcttgcaataccagcctccctgcccagcgctggaagtgggtctcccgaaaccggctattcaacctgggtaccatgcagtgcctgggcacaggctggccaggcaccaacaccacggcctccctgggcatgtatgagtgtgaccgggaagcactgaatcttcgctggcattgtcgtacactgggtgaccagctgtccttgctcctgggggcccgcaccagcaacatatccaagcctggcacccttgagcgtggtgaccagacccgcagtggccagtggcgcatctacggcagcgaggaggacctatgtgctctgccctaccacggtgaggggccgcttgcaggcgggagggtggggtccccgatgtccaggggactggagccatgagggacagattcccagtgacaaggcctttggcctctgtggacccttggcagtcacatgtttaattataataggaagcattttttaataattaagaaaattaacttcaggccaggtgcggtggctcacgcctgtaatcccagcactttgggaggccaaggtgggtggatcacttgaggtcaggagttcaagaccagcctggccaacatggaaaaaccccatctctactaaaaattcaaaaattagccaggtgtggtggagcatgcccatcatagtcccagctacttgggaggctgaggaaggagaatcgcttgaacccaggaggcagaggttgcactgagctgagattgcgccactgcactgtgcagcctgggtgacagagcaagactctgtccccccccccacaaaaaaaaaaagaaaagaaaagaaaaaagaaaaattaacttcaaagcatttaatttacttttgtaaaaattgcaaaatacatgcttgtaaagtcttcaaatagtatacaagtatataacataaaattaaatgaaaattcccttcccccaggcccactctccaggtgaaaccccattgtagccccccatgttgtcttaatgcctgtcttgcatgtggtgaatggggaccagagtcaccatgtgaggggctggcctcttgtggtggacagccccgtcctgggggggcctttcctgggagaccccctgagttccgagatagaactttgtggggacacagagcccatgggctgggtagctgagcagagattccaccgggctcagccctctgtgggtgacttggaggccctcttgcccagctggagtttggatgggattaggggtactagggagccccttcccagccctatgaggtgtgcagcaagacctctctctggttcctgggctgactcaacagcagaagaagccttaaagccactatggggtgccattgcctctcccacctgctgatccctgtgaacacccagcactctgggttttaggggatttctcctgagggtcgaggggcttggcagcctctggtgtccagatgccaagggcctggcccctgtccaccccctgcagaggtctacaccatccagggaaactcccacggaaagccgtgcaccatccccttcaaatatgacaaccagtggttccacggctgcaccagcacgggccgcgaggatggtcacctgtggtgtgccaccacccaggactacggcaaagacgagcgctggggcttctgccccatcaagagtgagagctgttggagccgtgggggcgggggcagtgttcctggagggaggctggtgctgaggggccccggggcccagggtgagatactgccccctcccctacctagtgtagccttttggtgggggagggtctgcactcccgagggaccctggagggggcctgaaggagagggctgtcgtggtggcaggtaacgactgcgagaccttctgggacaaggaccagctgactgacagctgctaccagtttaacttccagtccacgctgtcgtggagggaggcctgggccagctgcgagcagcagggtgcggatctgctgagcatcacggagatccacgagcagacctacatcaacggtgagccggggcctgatgcctgctcgtgcctctggagggcccgggccctttccgcttgtgggttggggagagggcgatggggagcgggggaggctggggctggggatcccctgttcagtgtccctccttgctgtcaggcctcctcactgggtacagctccaccctgtggatcggcttgaatgacttggacacgagcggaggctggcagtggtcggacaactcgcccctcaagtacctcaactgggagagtggtgaggcacaaggttgggggcgcagggcagcataggggccccgcgggctcttggcctcccatggactcctctcctcatgtcctcctgcagaggggcagtgtgggtaggggaagcaccgacctccacccccctccccagactgcgcccccctagcccatgtagggcggcgctgccccaggccgaaggtcttggtgcatatggactgggtgccagcctccactcacctcttcagccacccctgtgggcagcgggcaccagcgcacccagcagcctggacggggaggccggggcggggctggtactggttactgggtagaaggttcaaggcgacgtgcacccaggttagaaagcgcggaggaccccgtggtctggggcggagctggagctgagcaccaggcttcccgaactggctcaggcttccgagggagcagagggaggtaggaggttctgagcagggccccgggagccacggtgtgagcttctctctccgggggtgctggcgccctgccctccccacagaccagccggacaaccccagtgaggagaactgtggagtgatccgcactgagtcctcgggcggctggcagaaccgtgactgcagcatcgcgctgccctatgtgtgcaagaagaagcccaacgccacggccgagcccacccctccaggtgagccagggactgtgccgcagggtggggaggggctcccagggccagggacacagccacagagccgtggcaggcccagcctctcctccggttaccaccacagcacaaggggactctggatcctctgactcttatttcattgttcagttaaagtctgagcaaattggaatatgtcattaattcatttggggaacatgtgctgagatctgtgttaaatgctggcaatacccactgttacctcgtagagaccacagtctgctggaggtgacagacatctcaatgcagttagactatcccaggtcatgagtgattatagaaatatggatcagtgttagaggagcatagagaagaaactgattcagcttctgagagttaaggaggggtttatggaaataacatttgatttgggcctttcaaattgagtctaagtttaaaagatataaagaggtgtgggggaagggcattcctggcagagggaagagcatatgcaaaggtgtggaggcctagaactacactgcagctttaaggggtggtgagtgatggccgggcaccgtggctcacacctataatcccagcactttgggaggccaaggcaggaggattgcttgagctcagtagttcaagaccagcctgggcaacatagcgagaccctgtctctgcaaaatatttttaaaaaattagctgagtgtggtgatgcacgcctgtctactagggaggtcgaggtgggaggattgcttgagcctgcaaggttgaggctgcagtgagcctcgcttgcaccactgcactccaacctgggcaacagagcgagacgagaccctgcctcaaaaaataaataaataaataaataaataaatttaaaaaaaaaaagaaaaaagaaagaaaaagaaaaaaatggatggtgcctgttgcagtttgggtggagtatagattctaaccacttcaagtatggtcatccaaccagcagcacagcatccccggagggcttgttagaaatgcacagtcaggcccgccccagagtaattgaatcagaacctgcatttaacaagatcctcagatgattcatgtgcagacacagtttgggaagccctggcttaaagggcatggtgaagaagaggcaggttgcagccagtctctgcagggtcttggctgctgggccaagtttgggtggggccaggtaggctgtggggagcctttgaagatgtttaagccagggagtgtctggttctcgtttgtgatcatagagacagctttaggggcctcgtggaggagttggggcaatggacagggtctgctttagggattctgccccttactgctgtgtggccctgggcaagcagcttagtctctggggtgcagagtcctcattgcaaatggagaatgaagccaccccccttgcaaggttgttgtgaggaaggctggagatctggcctggcacgaaggagtttttctgtagttggctgtggatgtttactgtggtgtaggttggaggggctgtgcagtttcctgcgaagctgtggggtggtgaggagacttttacaaagaaaatatggcaacacacacacacacacacacacacacacacacacacacacaacactaactacagacagtaaagagtttacagagcaaaacttctgctcctgaccatggaagtcttgccaatgatcgactcaggactggtttttttgtttgtttgtttgagacagggtctcactctgtcacccaggctggagtgtagtggtgcgatcttggctcaccacaacctctgcctcctaggctcaagagattctcgtgcctcagcctcctgagtagctgggattacaggcgggcatcactacttcccggctaacttttgtatttttagtagagacggggtttcaccatgttggccaggctggtcttgaactcctgacctcaggtgatctgcccacctcggcctcccaaagtgctgggattacaggcgtgagccaccgcaccccgcctttttatttttatttttatttatttattttttgaaacagagtctcgctctgtcgcccaggctggagtgcagtggcacaatctccactcactgcaacctccgcctcccaggttcaagcgattctcatctccaggttcaagcgattctcatgctccagcctcccgagtagctgggattataggcatgagtgtgccaccacgcccggctaatttttttgtatttttagagatggggtttcaccatgttgcccaggctggtctcgaactcctgtcttcaagtgattcacccgcctcggcctcccaaagtgctggaattacaggcgtgagccacggctctggcctgattcaggactgctgaccactgctttatctcccattccgtaaggggccaggagcagaagcttgaaacgtcagcaacccgatctagggcacctccacctctagctggagggagccttgggccctagtccagtcctcccacaagcacctttctgaaggaaggggcccgctgggaggcccgggtgtgggcatgcctagcctatctgtggccccttaccaagtcctctgtcctctgggtcttcccggacctgcagacagatgtaaggcctcggatttccgcccctctgcccagcccatatctctctgcacgaggcatattctaggcaggttctgctttcccggtctcatcacttaagtcctgtcatttcgaaggcaggcgccccgtcgtgtccccaaagcatccacatttcccaagctcccttccggtccttgaggcccctcgggtctcagcagccactaaaatccgcttgtctggggcggcagcctcaggtcttagctcattggctaacaagagatgattgacaggtcctgagccagagagcgagcccaccgggctctcagtccgcccagctttgccgggtctccaggagcaggtgtggctggaccactggaatcccagtctgaggccgtgttctagtgggcgcgcagtttcctgcccgactaggcagaatcctgcccgagcatgacactgtgggtggtttggtgaagtcctgttttctcttgccaagaccaagtaagggcttgtttgcctcagctgccctcggatcccaacccctagaaggtgaacctgaaaggcatggaaatcggggcaagggagggcctgggacgggtggatttctcagccctggggttcagggttaggagttaggagcggggaaggagtcccagctgggggatggggccgatctgtagtgactttgagcacctcctaatgttctcggttgcccgtccaccaagacctcagattcctggtgggcttgcctgggccccattagtggctcaaggtcccgtttcccagttttctccctcctgggcttcccagacctgcacagagtgggtgctcaataaatgttatttgagagaataacagtgattccatttactaggcagggggccataagccaagcttgaatctcatagcaggaaaccccatttacagagggagaaactgaggttcatggggctggtttgtcctttctacccatcgtttattgactgattgattgatgcattgattgagataaggtcttgctgtgtcgcccaggctggagtttagtggtgcaatcatggctcactgcagccttgacctccccgggtcaagtgatcctcccacctcagcctcctgagtagcgggaccacaggcgcacatcaccatgcctggctaattttttattttttatagagatggggtctcccctttgttgcccagtctgttcttgaactactgggctcaagcaatcctccagccttagccttccaaagtgctgggattacaggcctgagccaccatgcctggcccacccatcgtattctgagagccacagccagaggaagtgttctgtcctgggtggaatctgccaccacgacttgggtctctgtcccggggctccagcagccctgtaaagttttgtgtttttttagcatttccaagacctgtggtggggaccgggattgatctgggagagtttggagaggaggtgactgggaggcctcgcctgtgttgacgtcaacccagtgggttggttcccagactgggcggctcagtccctgagcagcagcctcatgggtctctgcagacaggtgggccaatgtgaaggtggagtgcgagccgagctggcagcccttccagggccactgctaccgcctgcaggccgagaagcgcagctggcaggagtccaagaaggcatgtctacggggcggtggcgacctggtcagcatccacagcatggcggagctggaattcatcaccaagcagatcaagcaaggtgaggagctgcccgcccacgtgtctgggtggagggcagggcctcccactgccccacccatcctgtccaggagcctcagagaatgttccttcctccctactggtggctgaggctgacctctcaatgttttctctcccctcctctcctgctgcacccccagaggtggaggagctgtggatcggcctcaacgatttgaaactgcagatgaattttgagtggtctgacgggagccttgtgagcttcacccactggcacccctttgagcccaacaacttccgggacagtctggaggactgtgtcaccatctggggcccggtgagatctccctctccctatcacagggccacaaaatacacccccaacctccaggtgccaccccagctgaaggacatcctagttactatcagaacctgcctggaacctcttacctctcagcagtccccctcctccccaccaatgccttcccttccatgtgagagactgccggggcttgaatcctacctccacctccacctccaagtagccaagtcaccttgggcaagttactagagggtcactggggagatcagaggagttaattctcgtgaaaccttaggcacagtgcctggcgcattcttggtctcctcccagctgcccttccctgccagaaggtggcatcagaacccacattatgtgcagatactttgcaagcagggctgcactctgccagccctcgcccccagtgctctacccagtccagggtcctgtcatctcaagagattgttgggttttatgacaatttgccatggtttgggcttagatgtggtgtaagtgaaggaattgatggagggcttcaagcagagatgaaagacccttaaaaaagggacaaagccagctgagtgtggtggctcatgcctataatcccagcacattgggaggctgaggcaggcggatcacttgaggtgaggagttcgagaccagcctggccaacatggtgaaaccccatctctactaaaaatacaaaaattagccaggcgtggtggcagatgcctgtaatcccagctactccagaggctgaggcaagagaatcgcttgaacctggaaggcagaggctgcagtgagctgagattgcaccactgcactccagcctgggtgacagagcaagaccctgtctcaaaaaaaaaaaaataaaataaaaaggagaaagccgtagggacacagaccacccttcctagggacagacaggatgttctgctgtcacatactgcaaacagtgctgtggactgtagtggcagtcatttgccttaggggatgctatttaagaattttaaaacaattatgtattgagtatctaccatgtgccagtcatttttctgggtgctaggatacacaaacacgcctgccctcagaatggagcttagagacagacatactgctggctgggggcctgtggatactggggagggcgaagacagaagcaggggccgaggactaaattcctcctcagcttcatcagctgagattctggtctgggcacactggcctctgcacactctggccctgcaggcactagctagacgccttgggaatccaagctgtctatcctgccatcagttactctaacaatcttagccagtttgtttttgatatttataaaacgagttatcaataatgtaaaaggacgcctttcctttttttttttttttttttgagatggagtttcaccctgtcgcccaggctggagtgcaatggcacgatcttggctcactggaacctctgcctcccaggttcaagcgattcttctgcctgagcctcccaaatagctgggattacaggcatgcaccaccacaaccggctaactttttgtattttcagtagagatggggtttcaccatgttggccaggctggtcttgaactcttgacctcaagtgatccgcccacctcggcctcccaaaatgctgggattacaggcatgagccaccgcgccgggccaggatgcctttcccatttagacaatgcttgttaagtttcaaggcgtttgcacatgaactgcttgtgctctcatccaccctgtgaggcttatgggttcatcccgccttccccattgcacagctgggacacagacatgtcagaatcacacagtaagtcagagacagggccagctctaggaaccagattccaagaaggatttgggagatttatggggaggtgggggttgagattcttcctcaccctgtgtccgtaggaaggccgctggaacgacagtccctgtaaccagtccttgccatccatctgcaagaaggcaggccagctgagccagggggccgccgaggaggaccatggctgccggaaggtgagggtgtttctggagctgccctgagtggggccacctgtcagaggggctaccaggggagggagaggtggatgaactcctgctgcctcgcatggcatcgccctctcgtcggcacccccttccctgagctctccaaactgctcctttattgaaggagtgatactggatgggatgggacgggtgggcgctgttgggaggaagcagagctccccacccccagcccagtcctgagtccctccccatgggggaagccacttcctcgagacagcagagaacagggaggtgggggctggtctacccccgagtgccccctcagagtccagcctagtcatgtcaagcagtggctgccgaagtgaagtgtggcccctgtgcaccgccagtcctgacttccccctcctctgccgtctgacacagggcgtgtgctggtctgtctcccctggaggagtgaggccactcagggtggggctgcaccttccccctccttgtgttcccagccccagtgggcttctagaggatgtttagggaggttgagggggggggtgtcaaggaatgaaagctgtgtaagtgagtggggggtgagtgactgagggtgtgagggggtgacagaccctctcctcctccagggagtggagcaggggtgcaaatgctgtgatgggtgcggggagcttgcttctaaaagacactgcttggcccttggccccccccagcagccccttgcagccaggctggctcctcactctgttttcctttggattaagcccctaccacacccacctggaccccaaagcctcccccagaaaatgagcaggaaacactaacaggcatggccccatgggcgaggaagcagaggggagagcagagcccagctgcggagtctgtggactggcaaggacagtgcctggcccaggggctgtgtcatggctgcgaagaggtgaagggaggagtagagaggaattaccaacttctctggcaccaaggccagcctggaatttgtgtggggagtgttgagggtccatggttaacagcccaggatcaccaggggtcttggcacagcccctgccagcagatgaggcccccaccacacataccacatctgcttctcttctgccttggctcctgccagcctcgcctgccagggtctcgtctctgagcccctcctgccatccccgggccaggagcatcctgcgccgactccagctttgccaggccctcgaggactgcccatcccctctccatcctggcagctctccccagcctttagctgtggtttcccagccaacagtaatttccccactgtgtctcttggtttaaatgcccaagagaggagcctgaagggccattcatcttcccgagccgggtcactggccggtcgctggtggcctgccaatcagccacgctggggctgggcctccaccccagcttccacagctgtgggtgatggtggagggggaatgtggagaaacgaggtgcagaacacagcccagtactcaaaccagtcccctccgtcctgagcacgttcagtgatgtccctgatggcatctcccaccacaggatttatgggtgagggtggagagtcatcttccctacagacacccctcttctgtccactcttgagccagggttggacgtggcacagcccatcctgctactggctgggagaagaccaagtgacctacagtgaggcccggcgcctgtgcactgaccatggctctcagctggtcaccatcaccaacaggtacagcaggggcgggtgccctgactagcccttgcccatgtctgggcctattgtggtcccttcagcaaacagggtagcatctgccatcatgcccagagggacctggagtcctgtgaacctcagtgggctccagggcattttaaaatcttgtcagaagaatgactctcacttgttaagtgaccccagtgtagggcagggcccgggcaggcacaggtgtgggctggatacttgagaaagagaggccttggttgtgtctgattttctctactttcttctcagcaaagcaaggggtgcagagaatagaaggggcagctgggggttccataaatcagctgcagggctcccaggcgtccctgctttcttgagcaagttattggtcgggtgcagcacccgagctcccacggtagggcgtctggcctgtgactgggggattgggaagcagggagatccctgccctgaccagcctgtctcctgaaggttcgagcaggccttcgtcagcagcctcatctacaactgggagggcgagtacttctggacggccctgcaggacctcaacagcaccggctccttcttctggctcagtggggatgaagtcatgtacacccactggaaccgggaccagcccggtgagccccttatttgacttgccttggtgaagcgaggagggaggccagggtggactggccctgccagcaccgagccccagggcttccccataaacagatcattggtgcactgtggtgtagtgtctatgagcacaagctctgaaaccaaactgcctggctccgatcatgactctgccatcttttagctgtgcatcctctgagcctcagttttctcatctgtccagtgggaataatgatcctttcctcatagggatgacatgagtcttaaatatgtgtaaagtgctaatatgtgtaaagagttaatgtgtgtaaagtgtctagattacttctctatctgggctcacaaaaaagaaacaaataatctcttctctatctggactcatttaaaaaatgtgttcagaatactgagcgcaatacaagtgcttgttattactattattaccatttcacattcattatctttctaaccccttcaataacctgatgaggtagatgatgaagcaggctcggtgaggttaagcagcttgcctgagccctcacagtgggtgaacccagagccagggctctgcctccattcccttcctccctcctggctccaaccccagagagcatgtctctgaagaggtggccaagctggttcccagtgtgagggccgtgctagtgccctgccgggatgtgagggaggaccagactatgaatccttctcagagcctgggtctcccttccctctccttcagggtacagccgtgggggctgcgtggcgctggccactggcagcgccatggggctgtgggaggtgaagaactgtacctcgttccgggcccgctacatctgccggcagagcctgggcactccagtgacgccggagctgccggggccagatcccacgcccagcctcactggctcctgtccccagggctgggcctcggacaccaaactccggtattgctataaggtagggcagcctgttggccgggtagggggcagggggaggacaggagcaaagagacagtttggatggaggtcccagtgggaccagccacaatccagagacacaccaggctgcagacgggtgatttctggtgagacttgtccatggaatctggaggcctggtgctcagtaatcatttgaggaattgagggaaccacagatcattgatttcagaggttcccaaatgttggggccagcctagctgttcttcagaattgcttggggaacctgataaaaataaaatcttggccgggcgcagtggctcacacctgtaatcccagcactttgggaggtcaaggcgggtggatcacgaggtcaggagatcgagaccatcctggctaacatggtgaaaccccatctctactaaaatacaaaaaattagccaggtgtggtggcaggcgcctgttgtcccagctactcgggaggctgaggcaggagaatggcatgaacccaggaggcggagcttgcagtgagccgagatcgtgccactgcacgccagcctgggtgacagagcgagactccgtctcaaaaataaataaataaataaataaagataaaaatctaggctgtcacaatggagatttagattcattaggtctggattgggcctggtaatctgtatttttaatcacgctaggtttgggagccactggcagagtccgaggtcttttattatgcacagaaactgaagtctagggagaagaagggacttacccacgttaagctgtggctctgctgggattagagcccagatctccctgctggtcaggggatggggctcaggggccctctccagaaggtgactgtgccagctcccctccccagacctctgcagatgaacaggattgtccttagctagccttagccccctgtccagtaaggctccaggcccctcctctgccatggtgggaaaggcagtaggtgccccctgaggggtgggccagtggggacagcttagacagctggactctgcccctgcaggtgttcagctcagagcggctgcaggacaagaagagctgggtccaggcccagggggcctgccaggagctgggggcccagctgctgagcctggccagctacgaggaggagcactttgtggccaacatgctcaacaagatcttcgggtactgagccgggctgaggcgtgttaggagggcacccgcacacgtgtaggagcaggcatggccgacagacccttggttttgttgggcgagcagggggatggcagaatgtgggtgaccccagggaggcctgcatctgctgctggtgccaggaccatcttgtcctcactcaagtagccatggtgccctggcatcttgggagaacaggctggtgtgatccatgcactcataggagactgtgttttgctcaccatcatccccccagcaatgctccaacagacccacaaacttacatatgtaccccccaccccattgcaaaatctcccacatgctggtcctggcaagtgtttcccctcaccttacaccatcctacaatgacccacactcctcaatccacagtttttcctgagagataggaggagaaaggccgcagctatgaggatttgcccatgggcctccctctgagacaccacctctgtcctgggctctgagcattagcacgtggaatcccctagcactgggaaaatcgagatggatctgggcttcctgatagcttaattgaagggatctctcctctcagcaaacattgaaattacattatttgtctcataattacaatagctcatggtcatcacttctcaccacgtaccaggcactgtgctaaacatatagtcctcactcaagcctcccgacaaccctatggagcagacgttaacccctgacccttgtgggttgatagagaggttatttgcccaagttcatgggtgaacggatacttgaatccaggtttatttaactccagagccgtagatccctgccacctcctcatctgaacttcctaaactccgtaaagtaaaagcctgcagaatcttgctggacagggcacccccacccaaaaggaacccaaacaaaggggaggggccactgccccttgagtggatggcttggtccagctctccccagctctgtcttgtggggagaactttaccgaagtgacctcaacgctgtatcgatgggtcaatgtgaagcccagatggagaggccccaggccctgggggctgccccggtcacagctgcaagggacagggggcacgtttgggttcctgcccctctcacttcccatctcttccgtccccactcctgggttgtgctgaagtgaatcagaacccgagatccacgagcagcactggttctggatcggcctgaaccgtcgggatcccagagggggtcagagttggcgctggagcgacggcgtaggggtgagggggcctggggtacttgggactgcgaggccgggagcttggtgggcggggcctgtttggggcggggcctggaggtgggcgggttttcttgagggccgggcccccagtcggagccggcttcaggaaagcaggtccgagaggggtcacccggcccccggtgagaattcgcagctcaggccaggcctcttgttcacctgttccgggcatgggggcggcctgcaccttgcgcctcacgttcctcttccctccacccgcctcctccagttctcttaccacaatttcgaccggagccggcacgacgacgacgacatccgaggctgtgcggtgctggacctggcctccctgcagtgggtggccatgcagtgcgacacacagctggactggatctgcaagatccccagaggttggccggagtggcgctgggggacgcgggatggagcgaagggtggcggggccaggaattccagggagggtctcctttcctcacaacgtctttgtccttgttcccctaggtacggacgtgcgggagcccgacgacagccctcaaggtgagcaccccccagcccatcccgctacccatcgcgtgggagagggcgtcaactctggggtaagtcccgagaggcctgaatgaaatggaggggatgaggagttccggtcgagagaagggggacggggttggctcggacggaggcagccacagccctgtttgcttccgtgtgggaggcgaggcaagcctggggcctggggcctggcacggtgcctgcctgggtccggtgtgcctgcaggctcgcctgctgccgcctggctctgccccggccctgccgcgcccgcctccggggcctggcgtgcagcctctgcctggccgccgctcccacgcccgcgctgctcctgcaggccgacgggaatggctgcgcttccaggaggccgagtacaagttctttgagcaccactccacgtgggcgcaggcgcagcgcatctgcacgtggttccaggccgagctgacctcggtgcacagccaggcggagctagacttcctgagccacaacttgcagaaggtgggcattggattgagcagggggctgcaggctgggggagggcaggcccgggatgagggcagggggctgcctacccacacctgcccgcctggcttctccagttctcccgggcccaggagcagcactggtggatcggcctgcacacctctgagagcgatgggcgcttcaggtaggaacccaggcaggcagcagatgtggaagggggctggctgtccacacacggagcacagaggcagacttgcatttgaatccagccctgccccttccttgctggctgtgtggccttgagcaagatacttaacctttctgggccttggttttctcatctgaaaatgggaatatgaggcctgcctggtaagatttttgtgaagattagaaataacatatgcgaagtgcttacgcagcatccagcacattagttactaaataatggcagctcctgttacgtctggtgtcattcatcatgactaaggccctctcggggaagtgggcagaacatatgatgatccgggggcctctttgtatttggtgcctacttaccatgtactggggggcttgaggcaggaaggaccaggagcacctgggactcagaatttgagcttgtctttttgcccttgggcttcctgccctggagtcctcaggcttcttttctggagcagcaagtgtccagggacagctggggccttatctagaggcaccaggtccttgggtctttgactgccctgagctcagtagctccacccctcagcctacagccactaaaccccagaacctgggcccttccctgcccccattcctgcggccttcattgctgcatccggtggaggcccagctgggggccggtgctggagttacctctgctccatgccattgcagatggacagatggttccattataaacttcatctcctgggcaccaggcaaacctcggcctgtcggcaaggacaagaagtgcgtgtacatgacagccagccgaggtgagggcaaggtgggggcagagtgcgcagtcagctgtgcaaagggttaatgctgggcgagcctgggcagaagtcatcagtctgttctcattctctttgttcccacaacccaataaaggctagactcagcgaggggtggacctgtctccatggtccagaagacttgaattcggagctggacacaggccctgagcctctgcccagactcctctcagggcatgaggctgagtgtgctgccagccatgccctgccctgctctgccctgggggtgactgccctcccctcccctttccgcagaggactggggggaccagaggtgcctgacagccttgccctacatctgcaagcgcagcaacgtcaccaaagaaacgcagcccccagacctgccaactacagccctggggggctgcccctctgactggatccagttcctcaacaaggtaggaggtggcaatggggcacccaagggagtcaggggagaggacgtgaacagggaaaggctgagcctcaggagtcctggccttttggcagcaccaaactcatggcctcttgcctgtacccaccaacttctctttcacctggctccagtaccagggccagactccttggaaaatgactcactgtagtagcaccttccaatcctccgggaagcaaggttgtccaaataatttggtgagtgttctagatcagtgattgccaaagattttttttttttttttttgagaaggagtttcactcttgtcacccaggctggagtgcagtggcgcgatctcggctcactgcaacctctgcttcctgggttcaaccaattctcttgcctcagcctcccgagtagctgggattacaggcacctgccaccacccctggctaatttttgtatttttagtagagatggggtttcaccatgttggccaggctagtctcgaacccctgaactcaggtgatcacctgccttggcctcccaaagtgctgggattacagatgtgagccaccgcgcccggcctgattgccggcctgattatcaaagattttgataatgaactcctattagtaaaacaaaatattgagcttacatgaccaaactatgtgtgtgtacatttaacttatatatgtatatgtgtgtgtaaataaaacctacttccatactaatatgactaatattatatatagtaaaatatgtataagaacaaaagagtataaaacattagctaaagatttttaaatacttttaagtttaaaacatttttttggctgcgcgtggtgggtcatgcctgtaatcccagccctttgggaggctgaggcgggtgaatcacctgagattaggagttcgagaccagcctgaccaacatggagaaaccccatctctactaaaaatacaaaattagctgagtgtggtggcacatgcctgtaatcccagctactcgggaggatgaggcaggagaattgcttgaatcctggaggcggaagttgcggtgagtcaagatcgtgccattgcactccagcctgggcaacaaaagcgaaactccgtctcaaaaaaataaacaaagaaaaaaaaaacaacaaaaaaaacaccttttttttttttttttttttttactagtggtatgaaaacatttttttgtgctcactcaaaagtgattaattggctgggagaggtggctcacacctgtaatcccagcactttgggaggctgaggcaggaggatgacttgagcccaggagttcgagaccagtctggacaacatggagagaccatgtctctacaaaaaataggaaaattaaccaggtgtgatggtgcacacttgtagttccagctacccaggaggtgggaagtgggaggatctcctgaacccaggaggtagaggcttcaatgagccatggtcatgccactgtataccaccctgggtaatggagtgagaccctttctccaaaaaaaaaaaagatcaattataataattattgtttaatatgctcactttggcagcacatgtacaaaaagtgaaacaatacagagaagattagcatggccctgcacaaggatgctatgcaaattcctgaagggtccatattttgcgtagttcatgaaagttgaaggttgttcaacaaaaaaattgtctaaataattttaataagagcaatgtgattacatgtacttcacgtttttaaaaaattttagtctgacactttatgactcatgactcacaggtctaacgtgttgaaaatcaaagttatttcaaaacatgcatttcatggtggctatagattaaatatgcctcacaaagacaaatagattgaagtgaaaaaagttcatccatcatttctaaataattctccccatttttagtccttctaccaattaaacaaacatttttgtttaaaaattggctagtaggctgggacgctgagcactgggaggatcacttgaagccaggagttcgagaccagcctgggcaatgtagcaagaccctatctagaaaattctttttccaagtgttttgagtgtgcaggtaggaaagtttggggcactgacattaatcactatggatgcatttctcaacacgtttttacaacaccccctccatagtgtgagtttcttccccacagtcgttatttttccatgcacaggctgatttattagacctgattagtccttcattgtttttacctggcgattgacaacgagttcataccaggaagagaaggttgtcattttccttgttatgtgccagggtaattggcattaatctcaagccatggcttctttgcaggacattttaagaacacttagccctgttgtgaagattagattagttaacactgaataatataatccacaaatccttgtcatacacaggaaggcagccagcctcttagtgtcatggatctcctgccctcctcagaatattcaaaagaacattacacggccaggcgctgtggctcatgcctgtaatcccagcactttgggaggccgaggcgggtggatcacctgagatcaggagtttgagaccaaccagggcaacatcgcaaaaccctgtctctactaaaaatacaaaaaattatctgggcatggtggtggacgcctgtaatctcacctactcgggaggctgaggcagcagaatcgcttgaacctgggaggcagaggttgcagtgagctgagatcgagccactgcactccagcctgggcgagagattgagactctctctcaaaacaaaacaaaacaaaaaccacacaaaaaaaaaattacacctcttctaccttaaaaaattaaggcatgtatattattaaaactttggaaaatacagaagagaaaccaaaactcacccaacactctctagagatcacagctatcaatatttgttattctccttcctgcctttttccatggaattgagctcatactaaataatataatttcctacccaactcttctttctctgtatcatattttgagcatctctcatgttataaagtttttccaaaaacttgttctttttccatccactttttaaacagaatgtattttatatatgtaataggtcccattcttaatcatcattgtcaagataccagttactctcctgccctgtggaaagttctgtttgtttttgtttttgagacagggtcttgctctgtctcaaaaactgctggagtatggtggtaccatcatggcttacttactgcagcctcgacctcctaggcttaagtgatcctcctgcctcagcctcctgagtagctggcactacaggcttatgccaccatgcccagctaatttttctattttttttgtagaaatggggttttgccatgttgtccaggctggttttgaacttctgggctcaagcgatcctcctgccttggccttccaaagggcagggattacaggtgtgcgccactgtgcctggcctgtggaaagctctggaagtatgctagggtgttcactccttcactgcctgccctcacacatcttgctttactagttctgtgcccttctttgtgtccctatagcatttggatgtaggtaaagcatttatggcagctgtccccaacctttttggcaccagggactggtttcttggaagacaatttttccatgtactaggggaggggagggatggttttgggatgaaactgttccacctcagatcatcaggcattagattctcataaggagcacgcaacctagatcccttgcatgtgcaattcacggtagggttcgcactcctatgagaatcttggctgggcgcggtggctcagcctataatcccagcactttgggaggcctaggtgggcagattacctgaggtcaggagtttgaaaccagcctggccaacatggtgaaaccctgtctctactaaaaatacaaaaattagccaggtgtggtggtgggcgcctgtaatcccagctactcgggaggctgaggcaggagaatagcttgaacctgggaggcggaggttgcagtgagctgagattgcgccattgcactccagcctgggcaacaaagcaagactccatctcaacaacaacaacaacaacaacaacaacaacaacaaagaatctaatgccctgctgatccaacaggaggtggagctcaggctgtaatgccccttcgccccgctgctcacctcctaagaggccggggacccctggtttgtgggacagcctcttccactagctttaagctcctggagggcagggccactagcacctgccataccccttaatacacttgcacatggcagggatgccctcagtgtcggctggactgagctgaataccctccccctttagctgtcacttcttgctggtactggtgtgaccttgctgcttccaagtttatgatgaattctactcatgatttaagttgggcctcagcatggctctgaaactacttctgtgaaaccaaatccttgaactttgtgacagacctccaaaaatctgcattatttctgggcttacaattttttaccccaaatctgccatctgcatcagtaaggatggtgctggagctaattattaatagtcacagctctcactggttaagtgcctactgtgtcatgtactgttatctttaatccttaaaatgatccccaaagacaggctttgtattaccactttacagaagagtaaattgaggccataaggttgtcagagctggaatctgacatctcccccttacctgaatcccacccctgtctttatgactccaaagcttccctacaccctttctttttttttcttttgagacagagtttcgctcttgttgcccaggctggagtgtaatggcgtgatctcagctcactgcaacctccgcctcctgggttcaagcgattctcctgcctcagcctcccaagtagctgggattacaggcatgtgccaccacgcctggctaattttatatttttagtagagatggggtttctccatgttggtcaggctggtctcgaactccagacctcaggtgatccacccgccttggcctcccaaagtgctgggattacaggtgtgagccaccgtgcctggccaacaccctttattttccatcacactgcctctgagcagaaaatcattagatattcattttcctaagaaagagtcttcacttgatgagagatttcctacccagggcttttgtttgtttgtttgtttggaaaccttatagagctaatgaaagtgggaaaagagaaatgtaaaattacagagttagaagctgctgctaatagatcattcaacaatagagataaaagtgtcctagggctgggcgcggtgaaaccccgtctctactaaaaatacaaaaaattagctgggcatggtggtgggcgcctgcagtcccagctactggggaggctgaggcaggagaatggtgtgaaccctggaggtggagcttgcagtgagccgagatggcgccactgcactccagcctgggagacagagcgagactctgtcttgaaaaaaaaaaaagtgtcctagagatgatcatgtaagttcaaagggcaagataatggatgtcagacaacattcggaagggtgtttagcagaaagcaagatagatccttgtccccatcttcctagtgcttggcctaggcactgttgtcatagcctttgacggcccaaagaaatcctcccatttgaagatcccctggagtgtgggcaggtgtgtgtgaatctgcagtgccaagctgggaggtgctggaggctgccaagcagacccagctgtcctggttctcagatactgttctctcccggccctcaaaggccccccaggacctgctgctgaggggcgcacagtggcctttctgggtttgtggatggggtggtggggctggccattacatccccacctctgccccacagtgttttcaggtccagggccaggaaccccagagccgggtgaagtggtcagaggcacagttctcctgtgaacagcaagaggcccagctggtcaccatcacaaaccccttagagcaaggtagggccagcctatggggagcccccagtatcctctgacactgtccccccaaatagctatagcagagtcactcacaactgtcttctggggaccatagcattcatcacagccagcctgcccaatgtgacctttgacctttggattggcctccatgcctcgcagagggacttccagtgggtggagcaggagcctttgatgtatgccaactgggcacctggggagccctctggccctagccctgctcccagtggcaacaaaccggtgaggatgccctccctgttcccctccgcaccgcgctgccctaagcctgtggggctgcctttgccccagcatctcttgccccagggtctcccttcttccagcctctttgctcacattgcagccttctggggacagtagcacagggaggcagctgctggggctcccctgagcagctccctccccccagaccagctgtgcagtggtcctgcacagcccctcagcccacttcactggccgctgggacgatcggagctgcacggaggagacccatggcttcatctgccagaagggcacgggtatgtgtcaccagtcacctgggaaaccccagtggggccctggcaccgggctggatgctgggaccatgccaggaggaaggaatcatggtccctggcagagcagggctctgcttgggaagcagatgggcagaaaggcaaggtgccaataagatggaaaagcaatagcacccacaggtctcaggaggaagatttgggggtatggagggctcgttgggtcggggggagagctagacgctgggctgcatgaagtgctggcacgtgtggcgtcaaggaccctgaggttccaggtccaagacacctccagctccatgcgtaggtggcctctgcgccgggttccttgggtaggaggaggtcaaggccctcacctccctgtccatttgttagcaaacatgtattattaataacaacagggctgacacctaccaagccttggtctgggccaagcgccgagtctggtggagaccgggtctttgcctggtgtgcggccttctcctggccttgtgcctgggaacggggtgagggaagcagagcccagcctgaaccctgaccccttccctgtagacccctccctgagcccgtccccagcagcgctgccccccgccccgggcactgagctctcctacctcaacggcaccttccggctgcttcagaagccgctgcgctggcacgatgccctcctgctgtgtgagagccgcaatgccagcctggcctacgtgcccgacccctacacccaggccttcctcacgcaggctgcccgagggctgcgcacgccgctctggattgggctggctggcgaggaggtgggctcccgacacttttgccctgggccccagccttgcccgggttcccctccctgccccttcctgcccccgccttatccgcaccctatcctgactattcccttcctcccaccccatggccccccatgcccagggctctcggcggtactcctgggtctcagaggagccgctgaactacgtgggctggcaggacggggagccgcagcagccggggggctgtacctacgtagatgtggacggggcctggcgcaccaccagctgtgacaccaagctgcagggggctgtgtgtggggttagcagtggtgagtgcccacctgccagggcgggggcatgggcaagctgtcggtggccccggggagggtgctgagccacttcttaatcctgtacccccacagggccccctcctccccgaagaataagctaccatggcagctgtccccagggactggcagactccgcgtggattcccttccgggagcactgctattctttccacatggagctgctgctgggccacaaggaggcgcgacagcgctgccagagaggtgggtgaccaggccagagcccacacatggcgggcaggtggcacctcctctcgtgggcactcagacccatgagtacatccccacactgctctctacccataggcagcacttacacaagatgccctcgtgctctcacatgtggagaccatacatgacactatatgtgcatatgctgcccccccacacacttgcacatgtgcacacacacacacatgaatccacagactccacaccatcctctactcaggctgcagagaagagggctggagcagctctgggggactctgccccccccggagacccatccgccctgacgtgggccttctttgcatccagcgggtggggccgtcctgtctatcctggatgagatggagaatgtgtttgtctgggagcacctgcagagctatgagggccagagtcggggcgcctggctgggcatgaacttcaaccccaaaggtgggtgccctgtgtgtggggtggagaggtcaagcctcaggctgtaaggggctgccctccactttgccctgagccttgtcctggggcttgtcgggggacagggagtcggttctagaacacacctgctctcctccacctactcctgccccaccttgtccctgctccctcagtgccttctttcctgcaggaggcactctggtctggcaggacaacacagctgtgaactactccaactgggggcccccgggcttgggccccagcatgctgagccacaacagctgctactggattcagagcaacagcgggctatggcgccccggcgcttgcaccaacatcaccatgggtgtcgtctgcaagcttcctcgtggtgagcgccgggcaggcccacgctcagcctccttccaccccgtgccgctggtcctgggctggggctgggggctgcttcacaactgcagggggcacagccgatgggaaggcctgaacagaacggactgcgggcagctgggacccccgggataaattagtcagtgggatggactggacctgaaacttatcatccaaactagaccacaaggctcgggggtcagcaaccccctgtcactttgtagtggtcaagggcatggacagagttcaagtcctggccatgtcacttatcagtggtgtgaccttgggcagagtctgtggcctcagtttcctcgtatgtaaaatgggaataatagtagttccagactgatgtggtggctcatgcctgtaatcccagcactttgggaggctgaggtgggcggatcacttgaggtcaggggttcaagaccagcctggccaacatggtgaaaccccgtctctaccaaaaagtacaaaaattagctgggcgtggtagcacatgcctgtagtcccagctacttaggaggctgaggcatgtgaattgcttcaaccgtggaggtggaggctgcagtgagccgagatcgcaccactgcattccagcctgggcaacacagcaagaccctgtctccaaaaaaaaaaaaaaaaaaaaaaagtcccgacctcctagagtgctagtgaagctagtaaagatgaggtgagttagggaaggggctgacacccaggcctcccacgagggctgggctgagacctagctgagtgcagcatggcgttttccctttctgggggaacctgaagtcttgtctcttgggcctgtgcccccacagtaaccagaggtaggatgggagggggaactagagcctctttctccccagacctcccggcccaggcctgtgtgctttgtatgtttacttaagtgattattacgatgatcactgctattattaactggccccctcctcttgcccacagctgagcagagcagcttctccccatcaggtgagtgaaaggcaatgcccccaggtgggcaggcaggaagcactgctgggcctaacgcccacttggcctttcacgcccactcgccttggcagcgcttccagagaacccagcggccctggtggtggtgctgatggcggtgctgctgctcctggccttgctgaccgcagccctcatcctttaccggaggcgccagagcatcgagcgcggggcctttgagggtgcccgctacagccgcagcagctccagccccaccgaggccactgagaagaacatcctggtgtcagacatggaaatgaatgagcaacaagaatagagccaggcgcgtgggcagggccagggcgggaggagctggggagctggggccctgggtcagtctggccccccaccagctgcctgtccagttggcctatggaagggtgcccttgggagtcgctgttgggagccggagctgggcagagcctgggctggtggggtgccaccctcccacaagggctgggctgagacccagctgagtgcagcgtggcgtttccctttctgggggggcctgaggtcttgtcacctggtcctgtgcccccacaggaaccagaggtaggatgggagggggaacgagagcctctttctccccagagcccccggcccaggcctgttgatccgcgccccaggacccccttctttgcagagcccgaggagcctcccctgtcccctcgggcagatctgttgtgtctctcttcccacctggcagcctcagctctgtgcccctcaccctgctccctctcgccccttctctcccaccccttccttctgagccgggccctggggattggggagccctcttgttcctgatgagggtcagctgagggggctgagcatccatcactcctgtgcctgctggggtggctgtggggcgtggcaggaggggcctaggtgggttgggcctgagaaccagggcacgggtgtggtgtctgctgggctggagataagactggggagagacaccccaacctcccagggtgggagctgggccgggctgggatgtcatctcctgccgggcgggggagggctctgcccctggaagagtcccctgtggggaccaaaataagttccctaacatctccagctcctggctctggtttggagcaaggggaagggttgccagagtcctgggggccccagaggagcaggagtctgggagggcccagagttcaccctctagtggatccaggaggagcagcacccgagccctggagtggcccagtacccttccaagaggccacagtcccagccaggacaaagtatgcggcccatcctggtgcgacagcgtgggacaatgtgaacatggactcgaagacatggccctttctctgtagttgattttttaaatgtgccattattgtttttaaaaaaaaaggaaaaaagaaaagcaaacaaataaaacacctttaagaggcttgaaagagaaggttctgccttgtcctgtggtgagcctgcttcttcacgtctgtcccttcggagataactgttgttttggagcttgcaccacaggtgttttctgcagctggccattttgcgtctgtctctgggcctctaggggacactctcacccccgatctttaggagctcacccctctgggcctgcgcctccctctctctgttcctgggggcttgaatgtgggtgagaactcaggagccaggccatctgctgctgagcagccagccgtgcaagcttgggcaacttagcacacctctcaacatgtgcacagtggggagaaccggacccacctcctagggttgttttaaggatatgtgaggatcaagggagctcatctgtgcagagcacttagaacagtgcctctgggctctgcaagcgctaggcgttactgccgtttctgggctgcggctccaggggagcacttgatgtgtccaggccggccctgggtgggggctccacatcaccgtccttccaaggcagccatcatacctgccctctaacagcctgaaagttcacatgtgtccttagggagcctgggctctgaaaccacagaaggcagaatggacggcaggacctttactcacctgcttgttcattcagccggtatttgagctggagatgccaacaaaggaaggttaaccaacgccaatcgggcgaggcagggggaagctgctaatgtggcctgtgtgtctggggagggtctcactagagggagtgagattgactgcagcctgaaggaggtggcggagtgagcaatgcaaatatctgggccagggctaggggggcatccctggtgctttaggggaccagcagggaggcgaggtgggctgaggctgagatgagtcaggcagggccagattgtccaaggccctgaaggcagtggtagaatgtagcattattttcaggatagtgggaagtcaatgggaatggctaatcaggctgaccttttaacaagatcattctggctaggagttgagaaatagacaatggatgggaaacgggggagtgaaagcaggaaggctggtgcggaagctcttgtaataattcaggcacaacaagacggtggtttgttgggatcaggactgcagtagtggtcagattctgtgtgtgtgtgtgtgtgtgtgtgtgtgtgtgtgcgcgcgcgtgcgtgtgtgtgtgttttgccctgttcatgatatttaaaataagtttccacttttatgaatagacaatgcagtcacgcagtctgcattgcgtgggatacctaaatgatatcccaagatagatgttgcgcaagtcctgcccctgcccgtcgccctccagcctataccctcctgccctgtcagtttcctgtctttccagtgtttctttgtgaaagcaaatgaacgccagattggactgaagggatggcggatgcccttgctggggatgggatctgcctggggaaaggcagtgggagtcaggaagcactccaagcttcccgcctggactgcagggtgaatggggtgctgtttcctgagacaggagccctagggagagcccatgagctgctggcctgagtccaggactacggtggagcccaggggaccccctccagcaatcctctctgtgccgccccagcaacagcaggacccatggaaggcgcctaatcactcaggggagggagtcccagtcctgtgggaggttcaccctggagtgagttgctatctagccctgcagcccaaacagctccctttgtgagttaagtgccctgccactgcccacagtgagaggtgaagccagctggacttcctaggttgagtggggacttggagaacttttcttacaagaggtttgtaaaatcagtgctctgtaaaaatgcaccaattggtgctctgtagctagctagaggtttgtaaaatgcaccaatcagtgctctgtaaaaatgcactaatcagcactctgtacctggctagaggtttgtaaaatggaccaatcagcactctgtaaaatggaccaatcagcaggacatgggcggggacaaataagggaataaaagctgtgtcctccccacccaccccacccctagcagcaacccgctcaggtcctcttccatactgtggaagctttgttctttcactcttcacaataaatcttgctgctgctcctcactctttgggtccgtgccacttttaagagctgtaacactaggccaggcatggtggctcacgcctgtaatcccagcactttgggaggccgagacaggcagatcatgaggtcaggagatcaagactatcctggctaacatggtgaaaccccatctctattaaaaatacaaaaaattaactgggcgtggtgacaggcgtctgtagtcccagctactcgggaggctgaggcaggagaatggcgtgaacccaggaggcggagcttgcagtgagccgagattgtgccactgcactccagcctgggcgacagagcgagactctgtctcaaaaacaaaaaaaaagagctgtaacactcaccgtgaaggtccgaggcttcattcttgaggtcagtgagaccacgaacccactggaaggaaccaactccagacacaacaccacaagaaacattgggggagaggccccccaagaccctagtgactctaacctcgggagagaagaaaggtcaaggagtgaggtccggatcactagcttgaggggtgggagggagcagcggagggacggaggaccccagtggccagagctgccctcgtcagtggctggtgcctgctctcctcacgtctctctgccttgctcaggtgacgagtctccccagggccctgcacccacctgcaagcatttcagacagcgtcacgggtgcctggaggctacccctagacctcgttctaagcctgcccagagatgactaagggaggctcctgcatctctctgaaggggcaggaggcaggctctggatgccggccactcaccctctggctcaggatagccctggtggcagtctccttcctttctgctcatttcatttcaatacatcaagtacctcctctacataccaggctctttgctgggtggcagatgcccccaagcctatcctggcaggcctgggcaatcagcactgtatgccaggcgctaggcccagccttcacttgcagggttaacccgccccgctctggccacctggatccgtgaatgaatgggagaatgcggctgctctccagagaacagcattctctcaaccgcttcttgtcgcgccagagatggcctcctcgaaggtgtgctggcagagctggcctggcccagtgggcagccctgtgaggccgcaggggtgaggagccgccagccacaccacatggctctcctggaacggagccacctgagcccggccaagccgcctcgagcaccagggcttgagtccattgcaggcacaaggcaaagaattgcgacttgagggaggacccggaggaaggcaggctggagggagggagggcgggcaaaggacagcagggaaatgaagggggctgtgaaagaccagcaccagatgaaagtaccgagatgttccggacaggcctgattttctttatcttcggggctgggactgccaagaggccccggggaaagcctgcaggcttcactcccaccagaaccagcaccatttgagggacagatttcaatccttccttggccagacaagcaggcgggatgccagcgctggagaaaggggaggaggaggagcggtgggcaggcctttcctgctggaggtggacacgctgggggcgctgaggttcaaggccacacagtgaggagtgcagaaccttaactgtctccttgcatcggctgatggcagagctttagttatagccatttcagggaaatcctggtcagttaaggttttctagtgcagttgggattttcgcctatatttccaggtgcctctaaggtcctatggagcgtccaggtttcacagctgggggagggacatctggttcccggtcatttatgtccccgctggcttatgcaggggtgtcctgcccttctgcatctccctcagggacttggggaaccttggatggtgtctttcctcatactggggctgcagggggctcagaacactgcctctgacccactattcctccatgacaatgataataacaaaataggtattatttactatgtacacgccctgttctaactgcttaacacgtattaactcacttaatcttcccaatacaacataaggtaggtgctactgtccccctcttacagatgagaaagctaaggcacaaaggtgaagaacttgccatgccacctctcctccctgcactggaaaacgtgttgtggggtgggcaacagggctacagagagcccctcgagatcttgtagtcaggcctggggactaaagaactttgtcccaacctctcatctctggagagttttagggctattttgagacttgagggctaagaatgacctctttccttctgagcctccacggcctcccttcccaaagcagtggcggagggacacctgggtctcctgggctgtggggtacaatgcatagaaataaagtggggctcggttgacgtattagacatttataccattggggatgctttattttatattttagcattatttatttttattttttatttttctgagacggagtcttgctctgtcacccaggctggagtgcagtggcgcgatctcagctcactgcctcccgggcttcagcgattctcctgcgtcagcctcctgagtagctgagactacaggcaccctccaccaggcttggctaattatttttttatttttagtagagaccaggtttgaccatgttggccaggctggtcatgaactcctgacctcaagtgatccgcccacctcggcctcccaaagtgctaggactataggcgtgagccaccgcacctggcctcatcactgccttttaataaatgaggctgtcctcttggaatctcaagccatgaaaagccccatatggcaggcagactcctgccaggaaatcaaattgatagtgtgggtagtccccagctcctcaatgtctaccccaccctggacctcatgggaagcattcctggttgggtaaatccctgaaacagttttggccgggcgccgtggtttacgcctgtaatcccagcactttgggaggctgaggtgggcggatcatgaggtcaggagatcgagaccatcctggccaacatggtgaaaccctgtctctactaaaaacacaaaaattagctgggtatggtggcgaatgcctgtaatcccagctactcgggtggctgaggcatgagaatcgcttgaacccaggagacagaggttgcagtgagctgagatcatgccactgcactccagcctgatgacagagcgagactccatctcaaaaaaaaaaaaaaaaaaaaaaaagagtacagtttttcaaaaacctgattttctgatgtaaacctgtgatggtctcctcagctgcctcaaacactgtcacatcctactgtggattcaagctgtcaggatgtttacacggccacctcaaattccattccgctctctacaaaaacttatttttagacgtgcactgtcccttcttatacattcctcagtactggatcctggacaaatctttagtcaaccttaaagtttagttcaaaaggctcattttctcatagagtttgaggccatttttgtgagtggaggaacttgaggttttaggaattttatttaaatcatggagatattttcgactcgaatggctcttaactttgatcttgggtctaggctgcctggttgaaactactactggttttctttctttttttttttttgagatggagtttcgctgtgttgcccaagctggagtgcgatggcgcaatctcggctcactgcaacctccgcctcctgggttcaagcaattctcttgcctcggcctcccaagtagctgggtttacaggcatgtgccactatgcctggctaattctttttgtgtttagtagagttgggttttcgccatgttggtcaggctggtctagaactcccgacctcaggtgatccacccacctctgcctcccagtgctgggattacaggcgtgagccactgtgcccagcgaacctactggttggttttcaagagttgcatcactttaactggaacatatcggaagagtgggaccagattttaaggtgagtcaagcctggccttcctaaaaccctattgactccttaattcagctcagggcacccctttgccgcaaaaatctcatcctttgagacccctaggagagggtgagtcggggaagcaggggcctctcctagtctgagaagtcttaaaggcaggggggagaagtgccgcctcctcatttcatctttctctctcgttctcctctctctgccctttctctgtccctccctccattttttagaaaatctatagaggcaatgagctttagcaaatttatccagttgtgtaaatattgccacaaagcagctttataacacctcactcacccccaatagtcccctggaccctatttgcagtcaatccctgctcctttcccagcccccagcaactactgatctgcttgctgtctctctagttttgccttttctagaaattgtgtaaaatgaatcatatactatgtagtgtttggtgtctggcttttctcacttagcataacatttttgcatgtaccgtagtttgtcccctccatcttttattattattattattatttgtgacagggtcttgtagccttgtctacaaggctgcagtacagtggtgcgatcatggctcactgcaaccttgaccccctaggctcgtgcgatcctcctacctcagcctcccgagtagctgggcccacgagggtatgccactacacatggcaaatttttaaattttttttgtagagacagggtctcgctatggcccaggctgatttcaaacttctgggctcaagcggtctacctgccttggcctcccaaagtgctgagcttataggcatgagccaccataactggcccttttatttttatttatttatttttgaggtggagtcttgctttgttgcccaggctggagtgcagtggtgcgatctcagcttactgcaggggttcaagtgaatctcatgcctcagcctcccaagtagctgggactacagatgtccaccaccacgcccagctaattttttttttttttttggtatttttagtagagacagggttttgccacgttggccaggctggcctccaattcctgacctcaagtgatccatcctcctcggcttcccaaagtgctgggattacaggtgtgagccaccatgtccagctcttttattgttttttggcttaaaaaacaattttttttaaacaaaaacacacacacacacacacgtactcaaacacactcgcacacacaattttctcactaaccctctgaccttccaccccaagtcctgacttggtctttgggccctaagatgcaatcaggaaaaaaagtgtggagtccacaccccagttgggtcctaagtgggtacctacaggggcagccaccatccagcctgccccagcccatgggggcccaggatgtagcatccccagtgatggtgggagcaagggagaagtagaggtgagatgtgggctgtgacatgtgcttccctctccctccagcttgagacccttggcctctgaccaaggcaagtgaaataaacatgaacgaagctgggagaataatgtcagtttactgaatgaatacatggctcgagtccattcagggtggagtgaggcctggcaggtgccctcagcagtgggaccccaggccactggacctggcagggcttctgggctaagggggcagcaccaggccagcctgccaggggctccacagtcccacgctgcttgacctgtgctgtctgggactagactggtcgctgtggctgcccatagatgctcaagccagaccccaaaagagagtggcacgaggtgaaaatctaactgtgaacgctttggtttcagtttcagtaaagaggaggagggagggaggcacttggggacgtagaaagaagggctggcgggagaggtctccgccgagctccacagttggcttccttgctagacgacctggctttgagaaatgctgccttcatttccatctcccaactccgaatctggaaggcaagaaggtgtttcaggctggagggccgcagcagaccgtgggtctgttacagggggcacggcactgctgcttcatcttctcccaccccatccctgaggcccagccacccacatggccacagtgcctggaaccgtgtggggaacagagacctgcagtctggggccggggaatccacagactgccccattggggtttcagccacaccagcttcccccaaagacagcatcttggtcatctccacgtccccacatagcctggtgcagaacttgttttcaggctgaatagctgcaggggccattgcttcctctcagggtaaggccccacttgaacccccgcttcctaatttggcagggaagggggaacggacccaggtgtttcaggagtctttcagaaatcaatggctggatgcagagggacaagtgataggacggggaaagggagggagagcaagaggcactgggacgcagtgcagtcccagtggaggaggtggagttggtgggggtgggtggtctcctttattcttcggggaaactcttgtctcaatatgtttctttcccccttggcttgagtgaatgctctctgacaatttagaaacagtttaagccaggcgtggtggctcacgcctgtaatcccagcgctttggaaggccaaggggcggggggcggggggcggcgaatcacttgaggtcaggagttcgagaccagcctggccaacatagcaaaaccccatctctacttaaaatacaaaaaattagccaggggtggtggcgggtgtctgtaatcccagctgcttaggaggttgaggcaggagaatcgcttgaacttgggaggcagaggctgcagtgagccgagatcgtgccactgcacttcagcctgggtgacagagcgagactccatctcaaaaagaaaaataaaaaaagaaaaaagaaaagaaagaaagtttctgcctgttgtggaagaaactgttgcacggagcaggagcaactgacatcccctcaatcctacctggaccctctcaccctctcagttctacccaaggaagcccaagcccctgagctgcccccatcccctcgtccatcctgcgctttctccaaaagccagtagccttgactgggtgtttggggaggtgctctggcccagcctttggccaagggccctcacacccgcccctgttcctgcccctgtcctcatctgtttgcatatctgcaggaggtattgcccccactaccgacccaccaccccttgtcttggtgacactgggaagttatttgtgccactgggaagcagctgtcctggtgctggttcctgggcacacccagggactctccccagctgccctaacctcggtttcacttgtggcatttgtgtgaggctttggttctcacgtgcaagggaggggggcctggtcagcaggctggcatgggcaccacagagtcacaaagaggctggcacctctctgtgctacctggtgtgccctgatgttttgcctcttttcctcctgtgtacctcaaccgagctagggcagcaggtcacagctgtgactcacctccggcaacccatattaacaaagtgctgccaaccaggcgagtcatgccaggatgccaggggaccaagggagtgtggcctatgggggaggctgggtgcccatggctctgccaatggctaccctggctcttgtcttgagaacggctctggcgggaagccaggccaaggctgcgactggtcagcaccccaggatggtccctctgtgctgggttctcctcggcctcggctgtgcccacccgtgtctggggtgtgtgctgagctgggggcaggtggagatggcctgggcctccaggggagaactggctgtctccaccttggggccgagagcggcaggggagggttggtgatggggtggatcctccagcgggtcccagttcccggaggaaggatgacaaatgagtgtgggtcgctccctctgtgggaccatttgcctcggagcagcagggaagggcggcaggttccctgcctcccgtggcgactcttttcggagcaccaccctagggatgttcttctgccctccggagacgtcggtcttccctggggccggggctcaaggccagggtgccccaagcccaggctccagggtgtgcggggaaaggctcggtcctgctcggcgcggctcgccctgggcactaggggtcgcccctgcccagcggaagccacgcgggcgcgcccggtcgccgcaggtttccccggaccgggaaaagcgaggcgtctccggggcggggctggggagggggcgcctgggcgcggcgccgggaccctgctgccctgtcctcccggccgcggctggacggagcgcggggccgcagcaaccaggccgggctccccgtcgcgccccttccggagcgggaggccctcgccgaggcggaggctgggacgcgcggggcgggcggcggcggggagccgcggggccgaggcgcagggcgttttccccggaggtgcggcgtgcgcccgcgacacaaaggtcttttaaagacctcgcagcgcccttcccggctgcggaggctggaggcccgggggggcgaggccggggtcgggggtggccgcgcgagggggcgctgggatcggccagaccccgcggttgcgcccgggctggggctcccgggctccttttgtggaaaagagcggaaagcagggccctctccgggtctctgaaaatggtcagttcggcttcgcagggctgcgtgcccggaataataaattggcttctctagggtcgtaatctgggccccaccccgagcagctttgagctggttcgcgccttccaggcaggactactgggagttctcaaaagcacccccgcagtcggctgtgtcaggatcacctgggtccggtgtgaacacgattccagggccccaccccatcgcctgaagcggaatctctgggcggggcccaggaaaccgagtttttggtgagttcccgggtgattctgatggcaaagcccatgtgggagccactgttctaagggcttttggacaggcagttgtgaaattttcccccagaagaatctctggggacccagttgtcacacaccgctggattcactgcggtgttgattctgcctcctgatgaagttcttcccgagtctgacttcgagcccgcctgctttattaagcacgtttttctccagtcgtttttttttttttttaatggaaaaaggaacagggagaaggcttttctcgaacctgtttgcagagagccgtcttgcccgctttgagggccctttcttgggagacctgtttgctttgttcaacctctgaattcagcagaccccaaatccaccaaggccactagcttgtgagtgaatgtggtcccttcaggtaagggccagacagcccctgccagggcttggggagggttttcctagaggaatcctggcagtaaaaaaaccaacccccaaactctccaagtgctggacgctggagaatcccagcaaggaaaaggaacaaatcttatctcatgccggaagataacctcttccctttgttggcgcctttccttgcgttcaggatgaattaaaattcttatctgctctgcatccagtgaacttggcctcgccttcctgattgtttgctgcggctgactttcccaagctttgcggggttatttttgcctctgggtggtggtcattccttccttccatggcatttggttccacacagtcacagaaaaagagtaatttagcaaacaccctcaaaatggcaggactggcccccaaaacctactttcattttcctctgttctgggttgtgggtaatttcttgacaactacaagaaagaagacaatgagaaatgaattgttttttccaatacgattgtgaacagatgtataacctcctagtcgcagcaacgttctaggaatcccttacaccactttaaaggggcaggaaaatgggcagaggtgctgagggctgggtgagtgctaagcattggcagggctcagcctcatcctgacgagagctgcagccataacctgggtcacctttgctgtctcgggcttctaaatttggcagcgagaacagactcgcttcctttgagcaattgatctgaatagcagaatcccattctgatggtccgaatcacatttacaggctgtgggggtgaaggccgtgctaattggccacttgcctcaccactggctttgaaacaatcgcttgtattctctgcgcggcaggaagcagcagacccatcaaggccctgggctcactctttgttctgactttatggcattttatgccacaataagaaacactgtgtactccgtgggagcccattgtgccaggctgcaaggatgtgggctccggtgcagagggcctggtgctcttccccaggaagaagaggggctttgtgacaggctgggggacaaaacaaggggtgctggacactgttactgaggcaactgcctggccagtgtggaggcagctttagtccctgggaccgtttctgtgcccaaggagagggagggcaggggaaggatggaatttcatctagagtagcaggtcctggttgcctggtaaattatgcatcaggactgggctagccactgcctccgttttctctgggctcctgagataacctccacctgcctctagattctgtgccagctgatcgttatctatctcatcaactcttgttccatcaggaaactgcatcttggtgagtgggaagtttttgtgactgtggaccaaacctgggcttcccatattttgggttgatctgggccttggagggaagagctttcggttttgtagaaatgatgtggataggaactggggtaggcacagtccatccagtctcacacgtgaatgaaccaacggggatttgagaatggcttctagatcgtacctgcccctccggccagccccggggctcccttcccctgcacctagcctgaagttttccaccattaacggcacacctggggcagaagacagagtagggtccttgctccaggagatcgttgtaataatcagatagagacaagacctgagctgggaggaagccaggacacgggggatgggggaccaggccctgacaaacggagtgctccgtgtgggggctgaaagggaaggaggagagggaaggcagggccatttagcttcacctcaaaggtggggtaaagtgaggctggtgggtcctgtcttctctggagatgctccccgatgggaggaaaggccagcttcctgccggccacttgcagaagcgagcatccagtgcttccgccagcctgtccctcaccccagacccagccctgtccttcccatgtctgatgctcccacacgggcccccttattaccccgtgccattgcagcagcctcccggctggtttctttcccctgcaatgtggctgcccaagttctcctcccaaaacccacatctcctggcctgccaatcccaggctggaaactgttccatggcctccagagccgctcacaaacccttcccgccccactccctgcctgcaccttaggctcattctctgccctccctggccacacacctccctgactttccccaaacatgcaggtctttccatgtctctgtgcgtttccatttccctctgcatggaacactctttcccatcacacctacccttgcccatctgccaaaccctccaggattctgggtcaacatcatccccacggtggatccattggtgagagcaataatgaagcaggtttgccaccaggctcccaaagaagtgggaacactgactgcaaagggcacaatctgattggatgaaaagcgaggcctcagaagcattggcacgtgtccgcgaagagcctagctggaggtctgtcctagaggaggggctgaaggaggggcgagaatggcagcgctccatttcatccgactgctctgtgttcctcacatctgacccaaccttccgttacaacacaggcacatttgtggatactcttggttacatgtgtgttctctccttagattctgagtctcttctaggaaaggagtgtcttaatcatctttgtattcccagaagctagtttagaggctagtatgtagtaggttcgcagaaaatctttgaatagcggctgaggtgggaagatttcttgagactaggaattcaagaccagcctgggtaaactagcaagacccccatctctacaaaaaataaaaaattagccaggtgtagtggtggatgcatcccagctcctcaggaggctgaggtgggaggatcacttgagcccaggcattcaaagctgcaatgagctgtcatcccgccagtgcactccagcctgggcaacagagtgagaccctgtctcaaaaagagaaagaaaatctttgagtaaataaatatatgttgaacttggaagtattcctttacctagaatattgttctctgcaaattttgtactatcactttctccaaaacataactcaggactcgcctcctggaaaaagtaggttcttttttttttttttctttttgagacagagtcttgctctgttgcccaggctggagcgcagtggcgccgtctcggctcactgcaagctctgcctcccgggttcacgccattctcctgcctcagcctccccagcagctggggctacaggtgcacgctgccacgcccggctaatttttgtatttttagtagagacagggtttcaccgtgttagccaggatggtctcgatctcctgaccttgtgatccacctgtctcggcctcccaaagtgctgggattaaaggtgtgagccaccgcacctggccaaaaagtaggttctgattcagtagttgactgtgcatcagaatgttactaagcacctattaggtactaggcattttctaggcactggaggcctgtgagatataaaagagataaaggttcccgtgcccaagttgttaatgagtgcccccaacccatgcaggccacttccttatctggcaaaatcatttgggacgtcagtaaacactcaatgttcctggtatccatagtgccagggacatggtcagcagtcagatgtgactcactgtgggcccagcatcataagaggcaggcatagaaggcctggctttgcattcatatagctcacaacttcactgaggagaccagttgtttatgggattgcaggaaaccccaggaagccccagccagggaagagcttatgttgtcaaattcacagcctgtaggaattcactgggtccactagttctcttgcacaggtgctactttccagttatttcctggttttataaatatgtgtctcctctttcaactccttgacaagctctttacggaaagggacatcagggcgtcatgtctagcgtctagtagcttctttccctgatcctcatctccgcacctggtacagggcagtgcatgaatggatgacaaatgatcaccaccattaacaggcatttgtcagccgggcacgggggctcacacctgtaatcccagcactttgggaggccaaggcaggtggatcacctgaggtcaggagttcgagaccagcctgaccaacatggtgaaaccctgcctctactaaaaatacacaaattagccgggcacaatacaccgataatcccagctactcaggaggtggaggcaggagaatcactggaacccgggaggcagaggttgcagtgagctgagattgagccactgcactccagcctgggtgacagagcaagactcttgtctcaaaaaaataaaacaaaaaaacaaaacaaaaaaaacgaggcatccatcactgggtctcttcatgagacacaaccaagaaacacaatgtgagtgaattctccagttctggtagatgaaggagagggaaggagggcttctctgctgacttagtgcctctcttttgctcaatgttaccatcagattctgaatgttttctacgagaaattactgagatgcaaatcaagaagtgtgaatttaacaagagccagttggtttcctactttcatttgggtgcctttttttgttttttgttttaaacagggtctcactctgtcacacaggctggagtgcggtggcaccaatcatggctcactgcagcgtcagcctcccggcagcatcaacggcaccgggcctgggtgcctcttaactggttatctgtacctgttactgctcggtggtctaagtgggtgagatcaatttcagggtttctccagttcaatgtgagcttgtggtgagagaagagtgtccctggtccctcctgctgctttttgctctggttcccagcttgctccttgcaacttcttcctagtccaggacagatttactggaagtttctttagaggcagtgctttagggctttggtcttcatctgttgggttgtactgtttgtcgtttgtcatgtttgctttgcaagcctggtggctaatgttgcttgcattggctcactgctcttggggccatctgtaacctgtatcaaccccggatgctttgaagttcagtgtgcaataaaaagttcattaaaaagatgtggaatcatgaaaataaggttacagaaatgttaacaaaggatcatatcctgcttctggtacttttcttttttaaaaaatgtatttctttgagaaatttatgtcagcatttaaaccatggaagagtttaggaaggacaggcctgggtcaaaaggagggtgagattcttgaggagatatcttggcagagccccagcctgttgtcttaattgagagctcagggtctaaggagagaatgtgagccagaaaaaaaaaaatctaggtttcttatgactaacagtttgaacccagcttttttttttttttttttttttttttgagacggagtctcattctgtcacccaggctggagtgcagtggcacaatctcagctcattgcaacctctgtcttctgggttccagcgattctcctgcctcaacctcccaagtagctgggattacaggcgtgtgccaccacacccagctaatttttttgtaattttagtagagacagggtttcaccatgttggccaggttggcctcaaattcctgagctcaagtgatcctctagcctcggcctcccaaagcgctgggattacaggcatgagccatcacacccagccaggttcctctttttcgcaggtcctccatgttcgggtgcccacacgtaatacacaaccagcccctgcatccttgctctcctctatttttggggggcaaatatcctagaggctcattcggttatatgaccattgatgaccatttaattactactcatgtttaataataagcaattatgtgatcgtcacttacttttcagccagagggtcaccatgtgtacacttagcagctgctaaatcttagtcctaacaatgatagtcccatatcctcccaagcgaccgtgaggacctcaacagcttgcacatctaataaacagcactgcagggttttcagggctgccaccggacagctctgggtcacagccagacttaccctctctctttccacctggttgtggttgagcctcatgagttctgcaaacctctgctcatagaggtgaagcagcagcaccaggtacaagcctgaattcatcagctcgttttgtgcctacaaatggaaaagaaagctcttcagttcatctgtaaaatagtcatggtctaaattgtgggatgcagggtaacaaggctaagaggtgacaagaactgggagaagagcccaagctccaaggcaaggcctgctcttggggaccagaagacagagcaggaggagatccagggtagaggccagggcagccactcccctgggattttttactagctagtggaggatgctcggagaaagttccattttccaggctcaatcccattccacatttattgagcagttacatatgcaaagccttgagctggatgttgtggggaacacagggcaaaaagcctcagaactccctgctgggaaccgatcacctggtgtgggggagagagcttcatcggtaaacagctccagtacaagctggatgtgtcgggtgctacaacagagatgcaccaggccttgtccataacgttctcagcagtcacagatgtccccttgtgaaaggcttcctgaggagcctcctttgcccccatcattcctttgcttcccagtccctaagcattcgtcttgatcttgcatatcaccttttgcacttgttaacgtttccgctttctcttgaggagtgggctgtgctttttttctcgctggtgctcagaacaggcgctacacagggaggatgtgatggtctggctgcccatggcacttctctgtccttagcacttgggctttgctgccaagagtggctgtgctcactctagacctttcacagaccttccataaatcagtggtattagtaacaactactcctatccctctataggggaaggaggggaaggccctttcagtccccatctttcccttgagtgggggtcttgggatgggccaggctgtgctcacaaagccacccagcccccggggaatagagtccccagcagagggcatggccccttccgtcacccttgggaaagcttgcaactgtgactctgtcggcccaggataacgatgcgtgggcatgaatgacacagtgagcactcagtgtctcatctgccttcttcctgcagcagcgcgggtgccacatcttcctgttctcattagatccagggcagctcaggaggttggcacagaacccacctctcccaggaccaagcagctgccagaaaaggcacagaagttgagcaaggattgatatgctcttccttctgaatcagggccaactctggatcttggtgacagccggccctgagatcactgctgcaggcctctccaccattctacagatccatcttcgaaggccccagtcctctgtccttagcagttagcctcctatttttagcctttggtcgtgttttttgtgctctgctgaccttggcctagagtgagtagagaagaagttgcttgtttgcattatttctgttttatttatttaattttatttttgagacagacacagtcttgcccaggctggagtgcaatggcgtgatctcggctcactgcaacctccacctcccaggttcaagcaattctcctgcctcagcctcctgagtagctgggattacaggtgtgcaccaccacgcccagctaatttttgtatttttagtagagatggggtttcatcatgttggccaggctggtctcgaactcctggcctcaggtgatccacctgccttggcctcccaaagtgctgggattacaggtgtaagccaccctgcctagccactttttctgttttaattgcctcctcctgccctccccgtgagtctgtgcctgcctccgactgtctcgccaaccacctcttctgagaagccttcctcacctggcttttagctcctcctcaccaacaaagccttggtccttatttgtttacctcatccccggcttcctcctgcaaaagctgccagtggttctctcaccagtgctctttgccagccagcttttatgcttgagacaccgggatgcatgatgacaaatcaatcagctagaaaatggtttggaactatcaggtttgtcaaagcattcaggaaaatcatttactttttatgactcaataaggcccagaggcatgcagatgggagaatatccactaatgttttctgcagataatttgaaaagtcacttctagcagattgtgtctcttctctgatctgtgggagggaacctgccacacagtgccatcaatctcgccggctcggttcctttatgtgcgccctttgcagagctggtgatgctcgacaaaggggctcagcccaccaatcagagcaggcgtgtgatagtcaactccgaatcagcctttacactcctgagctacaagtgggagggatttgttaactcaaagagttccaccgcacttggctggccagggccaaatgaacgaggttttggagcagggcttactggagctacggcccatccaccccttccttgtcccaatcacatcacactttgactcccacgtggagttccctttgtgtgccagactgaagggaatgggggtggcattaataggagggggcggggacattaaaaaggagaaggcatgtgaaacagcgcaaaagggctccggagatctcagcccacctgccagctgttttctccattttgctaatattcatttaggccaagagacttgctactgacggaaattctcaatatattccacttaaagaagctgacagcctggctgaatgttctatcaagtcttcaaatatattcaagagtgctcctaggtataagggtgattaggtgactgcgtgtgtctgaggacatctgtccttggctgagatggagccaggccaggcctgtgcttcacagcaatgacagcctgaggcccactgagactctcctgtgcggcagagcaaggatggcaggggtgtgttccaattcagtgagcaggggcccctggagtgcatcttacctggaaagcgctgccggctaaggtgggcagtgcagggccaccggacactgtgactttaggcagagttttaactgtgcaggaccaaagggactcaatttgtaatggaagggaagtaacctctgttctgcctgtttcctcaaagcatgatagtaaagtgagctaatatatgggatctcgcaacaccaacacatcctacaagagacaagatttaaagacaggattccaggtaaattgtctgggcgttaagatctgtgagggcaagacctgcatctgtcttgtttgctcctgactcctagtgcctggcccagtgcctggtatactgtgcatgctttataaatatatgcacagatgaagcaatgagaaaaaaatgcataattgtgatggatcagacagtgacccattcagccacaacttttgaatctagtggctccaggtttaacatgcatcagaaatactgagcaggccttttcaaacacagttgccaggcagtcccgtcccctcccctcccccttctcctctttttttgagacagtctcactctgttgcccaggctggagtgcaatggtgtgatctcggctcactgcaacctccgcctcccaggtttaagtgattctcctgcctcagcctcccgagtagctgggatttcaggtgtgtgccaccactcccagctaatttttgtatttttagtagagacggggtttcaccacatttggccaggctggtctccaactcctgacctcaaatgatccacccacctcggcctttcaaagtgttgcgattacaggcgtgagtcaccgcgcctggcctcactgctcctcctttcctccctgcatttctgattcagctggactggagtgggcccaagaatgtgtacttctaacaagttcccagatgatgctaacgctcctggtttggggaccacccatttttgagaaccactgatctaaactaagggtgagcacgtggtagctgctaagctgaatctggcctgtggatgtgctctggttggatggaaggaagcaagaaggaaggtagaaaagaagagcatgaccatctttagttggggagagcactttccattttgccacaaatgccaccacgcccaatggcaggatacctagaagattaccatcatttgttgtctgcctggcctctgtggtatttgagtgtgtaacctgtgacctaagctttccttaaacctgttttcacctcatccattttggaggctagaatgttatttggctcgccgcatgctgctgtccaggagttctgccctccaccgcaaaaccgagtgcccaaccagcatccaatatgagtcctgcttccaggcgacagccaacgctcacaggagcaaatgtaggcttgcctcacacacagcactaccgaaagagtcaggagaaaggagggctgtactgccacaggccctgacagacctaagatgaaaccgccaggtccctggggtcccacagctgctcttgtctaatgatcccctctccagatgcttgtaggagttcctgatctagccgcttgaggcctggtaacagaccttgaccttgggcctcatactagaataatccgagttcagtgccctgttagcacctgtgagcagcatctgccctgctcccaccagaagtacagaactaaggtaggaaaacgtgctctgacgggagcccctccacactctcaaaggccaccgacagtgctgacccggcacctagaggacacgccctgatctgtgctcaggtcccaggggaggcgtccgtcccagatgtcacagacttcactccaaggcccggttgatagaaggcccgctcctctctttccttccgctgttaaacatctcttcttcagaaaggccttctctggttcagagagcaagtcggagtcccacagctgttcccgcagcggcctgcatggtccttgttttgacctccacctgcaggaattgctggcttcagtcttcgctgctggtcggtagggccctgcgggtcttgggtacggcagcattttcggcacagtatctcacaggcagcaggtgctcaataagtatttgaaaatttagttaaactggctgggtgtggtagctcacacctgtaaccctagcactttgggaggccaaggtgggaagatcacttgagcccaagattttgagaccagcctgggcaacaaagtgagacagaccccatctctcaaaaaaaaaaaaaaagaaaaaaagcagggtgtggtggcacacacctgtggacccagctacttaggaggctgaggcaggaggatcccttgaacccaggagggaccctggccccatcccagagctggggttagacctgggttgggcctgtgtatcaccattttaatagaaaaaaagaagacctgcagctaaatgttataagttatcattttgggtggtaaattataagaaatttttgtatggtttttgtaattaaacaaaagcaaaaaaaaaaaaattctaagtgggaaaatatataagaaaaacagttcactagtcagttagtttgaggttaagtgagaaccaggctaagctgaagcccgttctaggtttcttttggttttgccccttttttggtacatgtctagacttgtacacgtctagaagtggtgccacttctccagaaaggaacccatttgccaaggacaagcagcaggagggtggccaggaggcccaggtgagccaggtttggaagcgaggggaagggaccaggcccacaaggcacaggtgtccatgtcacctccacggccaggctggtggcctcctcagctgggcttgtcccctcagtgggctcaccgcgcctcggggacgagctgagtttcagtgacgttgtagatatctttgtgttcaacaacagttgcttcagtctttatctatggcgagcttcagaattcgcccaagtcaggctccctggggcctggggtttcgcccaggctgtgagcagacaggcactatgaattcccagcaggtcatggggacagtcagggctgcagtgaggtgtgagccctcagccgcctccagacagcagccgcccatgctatgacctggctctccccacagggcgggcctggcagcctagctgtcacctgggatgataatgcgggcatttcccaaaggctctgatggcttgtgaagttctcactgaaacgaatttaaaatcattcctgcttccacgtggagcaatgactgtgctggatgctttctgtctctcctgcagatccgcacccctcctgctctgtggcccaggggccggccccatggctttccccagccgggcttccttgccctctggcttcccgttgggtttggcccatgggaggccccggcaggagacccgagggcggaggagggagaagctgggtgtctcttcccaatccctctctgctgggcgtggtgtgacagtggttgctgtcttctcctgaaggccacaggctgctggtggctgatccttagctacagcgctcatgaccctggccacactgctagtcccaggacgcctcctcgttccttgctgctttcttttgctgcccagatttccctcctcccttctgcgttcttcacttgccccctttgagtgtgccaccatctcttcccacccagatcctggctgatacaattactgtcatagttctttctagaaggtgcttgtagccagttgtcttaacatggagggtgcggtggggccgaggatatggatgtgacccagtggggctggtttgttttgttagttcactgatggactctaggccagtcattggtgcacgtagctttctcccctgagtgccaagtcagtcgagcgtctctgtggctgtaatctgacagttctcatgcgtggagcctcctctgcccacactctgtctatgaggtgatgtactcgagtcttttcctacatccagacctgtgaggtgtgagttaacatctctcaccttctacagataagagaactgaggtgcagagaattgccatagtctcctcaaggtcacggggccactctggggaagagagtagggtttagactgagatcttaatcaaagctggtaggcttttcagtgggacctgcggcctcagactacatgagtgcaaacatcttagtacaaatggaaaaatgtgctgctgttgggtcagttctataaatgccattgataaaggacattagatggtggcagcagcttggcagagggagaaccatgtggaaaggcttggggccaaaagggatcttttctagacaaggcattcccctgggctgcacggtgtttgtggtgtcagtagattgctctgatagatagtattctgggcaacccatcctcacgtggacacgtcctccttaggagattcggcaggctccgttgcccaaaatgatctatttcttgagatgaacctgtcggcaccctgactggcacctgacctcaggcactgagaggttctggtttctttcagtatttcgcctcccacatgctcagcgtccaggaatgtgagtcgcgctgtttatcgtctcagatcttagtgcctggtggttatgatgcagtgatgtgagaccttcaggcctcaaaacactatttatttctcaagaagtccttctcctctcccctcccctgccctcccttctcttcctctcttcttttctcttttttccttttctttctctaacctcctgatgcctaacctctgtaatgctgctgtggcattatgcccttattcactgaactcttcaaatatccttcattcttgtcaatattttgttctttggtctacacccttaaaattttaaacaaggaaactgcagaattgcctagactcacacaaatcattttgacttagctgtcaaaacgttggccaaaaaaaggtctggtaaatattaattgactgcttataaagtggaaatcaccttctagatcagccccatccaatagaatacactcagagatacaaacacaaatcacagatgtaatttaaaatttctagtagccacattaaagaagtaaaaagaaactggtgaaattaattttaacaatataatttattaacctaatattttcaaatgatcatttctgtatgtaatttttactttttttttgatattttacttttttggcattaagtatttgcctaagaaaatctttatttctcctttgctcttgaaggataattttgcagggtacagaaatctaggttggccagttttttctcttaacactgtaaatattttgtttctctgtcttcttgcttgcatgctttctgggaagtcagatgtcattcttatctttactcccctttagggaaggtgtttttcccctttggcctcttacaggattttttctttatctttgatttttttttccattttaaatatgatgtgtcatggtggtgggttttttgtttgttttgttttgttttgcttttggcatttatcttgttcggtgttctctgagctttctggatttgtgatttggtgtctgacattaatttgggggaaattctcagtcattattgcttcaaatatttctctgttcctttctctctttattctccttctgggtattcccatgatgtgtctattacaccttttggataattgtctcacaagttcttggatatcctgctctgttttcttttctttttttccaatctttgttctctttgtttttccattttgggcagtttctattgggatatgctcaactcaaagattctttcctcagctgtatccagtctactaataagcccatcaaaggcattcttcatttgttagagtttttcacctctatcatttctttttctttcttagaatttccattcctctgtgtacactgcccatctgttcttaagtgctgtctactttacctgttagagtccttagcatattaatcatagtgttttacattcctggtctggtaattccaacatccctgccatatctgagtctggttctggtgtttgctctgtctcttcaaactgtgcttttcacctttgagtatgtcttgtaattttttcttggtagccagacgtgatgtactgggtaaaaggaactgctataaatgggttgttagccatgtggtggtgaggtgtggggagaggggaagtattctacagtcctttgagactctaggtcccagtctgagtgagcttgtgcctctggactgtgaacttcacaagtgcttctcagtttctctatcctccccctcccaccttaggtgggacaagatggctagagagggctggagttgagtatttcccttcttccagttaggtatggcgctctgataaaacctccaaaggttaggctctggttaaatagtttctcctgagggcaaactgttagtaagaacagaaagctctggcttataccaaaatggttactttccccctccccctgctggaagcatgaaggaatttttctctgctattcactgtaagcacctggttgcactcctggacagaaaactcactgaagtgtggggatacccttatgacagggtccccctggaatttttgactctcagacttgtctacactgagcatccagcagttcattaattacagcttaagattgcttgtccagcactggtttccatagagctttctgctcaggagtctctgctccggtaagttgtgatttttttttttttttttttttttttgagatggagtctcactctgtcgcccaggctggagtgcagtggtgcgatctcggctcactgcaacctctggctcccaggttcaagcgattctcaagcctcagcctcctgagtagctgagattacaggcatgcgccaccacgcccagctaatttttgtatttttagtagagatgggggtttcgctgtgttggccacgctggtctcaaactcctgacttcaagtgatccgcccaccttggcctcccaaagtgctgggattagtgattctatctgcctgtctttccaattttaggggcagtgatttgctctgtgacttcacttctcttatggatctaagaagggttgttgattttgcactttttaaagctttttacttgttgttaaaacgaagtgacaacttcaaactctttacatactgaactggaaagtgtactaagtctttgaaacttggtgtttaaaattaggtgatatattacccccctttttttttttggtactgtgtctttgaaatttggtgtgtatgtgacacttacaggatatgttgattagaacaagccacctgttcattagccacaagtggcttgtgacttctatattgaacaaaatagtattaggttggtgcaaaagtaattgtggatattgccaacaaaagtggcaaaactgcaattacttttgcaccaacctaatagttctaaatggaagactgtttgcctgagaattgggtgattaactgttatctcaggcacaaatcaacttcccacttgagggtaactaacttttttacaatattagaaatgcagtccaaataccctaggagagttaattcactaggtgataaagatcagccagtaggcatttacctcatgttcattagctgtatgtaggtaaagcagttccttcttatcccagggttacttggtatttaaattagggaccatttcctccaagaccctgatttttttttctcttgttattaaattacttctgcaaacgtgggtgtggagcttgccagaattttttggtatttttctgtgtccagttgcccactgaagcttcttacttttgttcccaacagcagggcaaactcaacccaggacaaataagacttccaactctcggccaggtgtagtggctcacacctgtaattgtagcactctgggaggtggaggcagacagatcacttgagatcaggagttcgagaccaagctggccaacatggagaaaccccatctctactaaaaatacaaaaattaggtgggtgtggtggcacacgcctgtaatcccagctactcaggaggctgaggtgggaggatcgcttgaacctgtgaggcagagtttgcagtgagattgtgccactgcattcccgcctgggcgacagagtgagactctgtctcaaaaaaaaaaaaaaaaaaaaaaggcttttcaactctctaatactctaatttagtggcaggtcttctcagagaagtaagctaaatggatattgtcagactcctgccagcagagaccttctacatttcttagatcagggaaggggaatgtcttctcgccctgcccctctaacatactttaacctgtggaggcagagtggccacatttcttacctgagattgctggtgcttctggtagaactcaatcatgttaaagtcacccaggtcaaccagcaggccttgcttacacatctcacaggtcttcacggcaccaagatctgctccttaaattggataaagaattatatgtacatataaccatgggtctgtttgtgttagcactttggacaggtgatatttggggagtgaacttgtgtgtgttatgaattctgagcttcagtgaccttcctttaaagccagccatcttctgtagaaaatgaccttgaatctgagagctgaaaaatttcctttgtagtcatctattatgcaagcttcatagaagtgaaattcccacgacttttaaatagcagatcttgctttctatttaaatataaacaggatggttcataaacttggaattgctgcacagaggctaagagtctgtaacacaggtgtttgtaaaaagagtgactattcagctttttttttttttattgtagacccaacacaggtccaagtaaataaattagtgaggaccaaaatagatggcagaagctattctcgatcaatggcttaaaaatctgcctttactcctgcccaggtaacattgccacctgagaacagtgagggagcgaggggccaggtgtgggtactagttacagtagtacccagggccagctcatcagcctgagctcagactcatcggggaaaaggaatatgagaaggcttcctttgttgctgtttttataaaaacaggcattctagatcagcatttttatcctattccccaatgcaaaagtggaggatgcagagctgggctgttatgtctaagcaaacattctgccagacagtttctcccccttagttgcggcttttgactaatgatgtactggtgtttattttatgcattagaaaataaaagacctattagttacctgcatgtatttggtaaaaatagggcttgtgcagtttcatacctccattctatttccccactggggatataaagaaacagtaaataatagagactttcaaagggcaaggatgaacaggaagtaatcccttatctgcattttgttcgcttgactttttttttttttttttttagcgtcattcagtaacgctttaggctaccaaatgtcccatgagtcttccgatcgaatcctactgaacacacccatacaagcgttgacatttatgagcatagcagcattttcatgacatgtttcacaggtaactttttctgtgttagatgtttaattggcccaaatttctaggaagataaaggattgcatggcagagtcgttagcaaccaaaatctactcgttttcttccctctctgaaggactgaatattttgctcgttatatggatatgcgtttaagcatcttgatcagtggacttatatttcttatgctagggaagttgcataaaacgggctccatggatgacacagtaatatgattaccccacgtgttcattctctgattccatggtgtgctgtccttggtgagggggcgtggcaacacctcatggggacagggtaaagctctaagtctccctgcagcctggatagtgacggctaaggagaaggatatggaagacggggagaaataggatctggctgtggggggatatgttttcagagatgtgtgtctgaaagaagccgcagctattttctgatcaagttgctctttgcactgatgttccatgcattttttttttttttttgcttaaagttgatctcattcctaaagccatgctttaaagaaaccttctgttctctgcccagaaaactacagccgacctaccgatgtggttgtatttaggttataacctgctcagggagttgagaaggtgccgcacacccagttataagatgctagggagctgacaaaatcagcacatggaaatttctttatctaatatggttctagacaatcagatcagcactcttatccctattgctaaaaggcagctttgtttagtttcttaggtgacccccaaataaaaggaagtaggatgtgtgtgctgggggtctctcatgagggaccttctgaagtattttgctgggtgtctgctagctgggcacggctactgtgtgtctgctgagcttccaccgctgacccacttctatttccttcctcctgagaggcgatcttagcatctctgctcaggcctcaagcagaggtagaattcaatagcatttgttcccaggagtcttctctcagataaaagcaaaaaacaaaaaacaaaccaaaacaaaaacaaacaaaaaacccccaactccctcccatagtttaaagacagcttttatgagcaaggatctggagctcagccacgtgtccctgagtcgctgttctgcggaggagagtgagctgatgacaaggctccggggcccacaccgtggtgcctcatgttaattacatgtcgtggcacgttcactgcacttccttccccacctacctgatgttattttcactttcagccactttttcaggcactcttgatgaacaaactgcaggcttcccacacagccgcaaggctccaggagggggttgcttggggaacccccggctatctgacagatgcgacacaagtctccctcctcctcggagtcctcctccaggagactaaatgtgaaaacaagccctcgtgaccaggaggctacacgtttgcagtttctacaaataccagttcccagagcattgacagagaaggaagagggctcctggtactcacccgctgccccctctgaccctagtgagatgatttttgataacacaggcacaaattctctctttttttttgaaacagagtctcactccgttgcccaggccggagtgcagtggcacaatattggcccactgcagcctcaacctcctcaggctctggtgatcctcccacttcagcctcccaagtagctggattacaggtgcatgccaccacacctggctattttaaaaattattttgtagagatggagtctcacgatgttgcccagactggtcttgaactcctgggctgaagcgatccacatgccttggcctcccaaagtgctgggattacaggtgtgagcccctgggcctggctgaggcacaaattcttgtaacaggcttctttgcaattgtcaatacgtgtgagctgacatggaggaccagcactgccaccataaatcaagaggtaaagggaaatggctacagaatcattttcaaactggagtcaaggccaggagcccctctccctgccaggaagttggtgggggtggcatactggtgagtgcatgggattcgtggtcagggggcctgggtttgaggccagcctctgaaacttgtgagttgtgtgactttggataagttccttaatcttcccaagaccctgtttcctcatctgtacaatgagggtcatggtgataacaccactgccacctacttcctagggctgtggccaggctggctacgtgtgacaatgaggaacctgttctgcaaactgtaaagtacatctagtgtctggcaaggtgttgtgcacagagttcacttaatagatgttggtttaggtggatgatgaaccaataaacctggacacaatctcccgaataacaccacacatgccaacaaatgacatcagcattccagaatgtaagcggctggaatctgatgaagataagaactaacgaaaatgtaagtaaagatatttgtgtctaataaatggtgagtgaagaatagctggtcgatgttcatgttgggaggttttaagaagcctaaggctattttcttttctttagagtcctcacgggactgggggccatctggtcaaggaaaggaaactggctagagactaaaatcaaaagaggaagaaatggacattgctctggatggagaaatatatgctcaatttcttgaaagacttttttccccatgaaagggcagctcagtgtaaagaagcagaattacagttttccattatggacattctcaataacttaaagacattttcaacattcagacttcaatacatttcaacataatttccatattttcgtaagtaatcaggaagaacatgtgtacatgggagtgagtgctccaactggtgaagataaactagagagagatcttgcaagtttgagaaggtaggcagaaaagtggtagaagattattttttgttgttgttgtttgttttgagatggagtcttgctctgtcacccaggctggagtgcagtggctcgatctcagctctctgcaacctctgccggattcaagcgattctcctgcctcagcctcccgagtagctgggattataggcgtgcaccaccacacctggctaatttttgtatttttagtagagatagggtttcaccatgttggccaggctggtctcgaacccttgacctcaggtgatccgcctgccttggtctctcaaaagtgctgggattacaggtgtgagccaccacacctggcctagaagatttttaatttaggcaactacacgggatttgcatttggaaacaagtgctctaaatcagtggtttccaatagaaaataaatgaccatcaggttcaccggtagagattttacaaacagattcctgggctccacccttagaggttctggttcagtatctggggcccaggaacctgaacgttaagatggtcatgcaggtctgaagatcactgatctcaacaggaggacgaagggctctgtggtgaacttgttatggttgataaatatctgactcttaacttaaggtcctccatcttctcaaaggtataggtggggatccactggctaccctactttgcaaaaaaattttttttaacaaataaaagtgaagaagagacagaaaagcacagaaaagaaaaggagaatcaagcataaaatcattaccccaaagtaactgcttgttaatagttgagtctggccgggtgcagtggctcacacctgtaatcctagcactttgggaagccgaggcaggaggatggcttgagctcaggagttcaagcccagcctgggcaacacagcgagaccttgtctcaaaaaaaaagaaaaaaatatatagcttggtgtactagcctttggtattactcctgtgcacatactgttttatagaattgagactgcttttaggattagctcaagatagcaggctaagcacccccatcagtctcctttcccacacaaatctcttaaaagaccaaaaaagaaaattaaatagaatgaatccacaatagtgctggaaaacaagcaggccagaaataatgaggaattcttggaaagtcgatgaagatatgatgatattgacgagaggaaaggaaatggcaacccaaggcattctcacagaagcatggagaagggaagggcagacccagggaaatgccaggcttgggctgcaccaatgcaggggatggggcaattatgagggtacgagctcaagaactgcttcagcacgaggggaccagctgctgccccctttcagataccctgtgatgcaggcagcaggtggcatagtgcctctcccaggggaacattctgtcattgtattccaaagaaagggaactctccataaaggtcaaagttttttgtcttgctagagacaggtctcactctgtcgcccagtggcaatcatagctcactgcaacctcaagctcctgtgctcagctgatcctcccactccagcctcccaagtagctgtgaccacaggtgcacgccaccatgcccagctaattttaattttttttttcttagaaacagggtctccattgttgccaggactggtttcaaagttttggcctcaaccaatcctgcctcagcctcccaaagtactgggactgtggggagtgagccactgtgcctggccacaggtcaaagtttttcaaaaagttcacgaatgacattcaattacacaaaacctcccattcaggaaactggatctcagaggagaaaaagcacacaattgccggggacagcgtgctggccacctctctctactaaaccacccattccttccttcatgaaacaactgggggccacctgtcacatgtggaaaccaccagcatgaatgagaggggacaaggaaaataagtcagctgactctagaggaaatgaattgtttaacgaagggaggaggtaattctcaggaggattcagagaatattggcagctgctatgtaaaaggaacagcaagagataaggaggatttctggagatttaaaaaaatgtgattaacgaaataaaaaattccaggtgaaacaatattaatggacaaaatataattcaggctaaaagtctaaagctaaatattgattgatccaccaagaagagatcagccatgagctttaatgcactaaataaaagcaaaattcttatacatgcaaaggagaatgggcaaatccaaatcagagtgaaggattttaatcaatgtctttcagaaattgacaaactcaatggaaaagaataaagtatgaagggtttttttgtttgtttttaagacaggggtctcactctattgtccaggccggagtgcagtggcaagatcttggctcactgcagcctctgccacctcctgggctcaaagtgatcctcctgcctcagcctctcaagtagctgggaccacaggcacacgccaccaccccaggttatttatttattttttttttgtagagacggggttttgccatgttgcccaggctggtcttgaattcctgagctcaaggaatctgcccaccttggcctctaaaagtgctgggattataggtgtgagccactgtgcctggcctgaaggattttaacatatgtattttatatatgtatgccaacaaagagagaagaaagaatgtacaaccttttctaatgccatagcatatttataagtattgaatatgtattagggcacaaaaaatactgttcgtattttctgagatcacaatgtaattaaattaggatgggcaataaaaaattttgaaaagagggtaacaaagagagattatatatatatttatatgtagatgatatatatttattatataaatatactaaaaatatatttaatctatgtgtgtatatatatacatatatatgtataaatatacaaatataaatgtataaatatataaatatatatatatttttagagacagggcctcactttgtcacccaggctggagtgcagtgatcacagctcactgtagactcgaccttctgggctcaagggatactcctgcctcagcctctagagtagctgggactacagacatgtgtcattacacccagagaacatatatattttttgtagagacagggtatcgccatgttgtccagactggtcttgaactcctggccccaggtgatcctcccaccttggcctctcaaagcactggagttaatggcatgagccaccatgctcagccctcaaatatttttaaaaaaccataaatcagccgggtgcagtggctcacgcctgtaatcccagcactttgggaggccaaggtgggcagatcatgaagtcaggggttcgagaccagcctgaccaacatggtgaagccccgtctctactaaaaatgcaaaaattagccgggtgaggtggcgcctgcctgtaatcccagctactcaggaggctgaggcaggagaatcgcttgaacctgagtgagtggtggaggttgcagtgagccgagattgcaccactacactccagcctgagcaacagagtgagacttcgtctcaaaaagaaaatgaaaaaaaaaccacacaacaaaaccccaaaaaacaaaaacaaaaccataaatcaacaataaatgtgtataattgatggagcatttcacgcagtgaaagtccgaaaacagactgataaggatagtgtatgccaaagaaagcatttcaaattagtaaggaaaggatagaatgattgtggattaatgggataaacatttttaaaaagaccttagaacctcatctaataccatacatcaaaatatattccatatgaatttaagtatagctaccatgtattaagcgcttactgtatgctagatagtctatgacacacataaatgtttaaaacctcatttagttgtcactgttctttgaggagtatgtattgttatttctattttctggatcaaaaaacaggtttttagaaatgaaggaacctggctgggcgtggtggctcatgcctataatcccagcactttgggaggctgaggcgggtggatcacaaggtcaggagttcgagaccagcctgcccaatgtggtgaaaccctgtctctactaaaaatacaaaaattagccgtgcatggtggtgggcacctgtattcccagctactcgggaggctgaggcaggagaatcacttgaacccgggaggcggagcttgcagtgagccaggatcgtgccactgactccagcctgggcaacagagcgagactccatctcaacaacaacaacaacaacaacaacgacaacaacaaaaaagcagtgaaggaaactgccagaatcatagagctaaaagttggtagaatcaggaatgaaatctagaaccataagacagcaaagcccatatttctaaccactatgatatatgaaaggagaatataacaatactagacaaaaataattatggatgcttgagtgagcattggagtttctaagcatggcaccaaatgtgaaagtgatacaggaaaatactgacagatttgattgtaagtaatgttaaaattctactacaccaaaaatatatacataaaatgtaaagtaaataaaatgggaaaagtaaaaacatatctgtaaaatatttgacaaagaattactttttgttttttttgagatggagtcttgctctgttgcccaggctggagtccagtagggccatctcagctcactgcaacctctgcctcctgggttcaagagattctcccacttcagcctcccaaatagctgtgactactggtgtgcgccaccatgccctgctaatttttgtatttttagtagagatggggtttcatcacggtggccaggtgctggtctcaaactcctgacctcaagtgattcacccactttggcctcccaaagtgctgggattacaggagtgagccactgtgcccagccaagaattactaatgacaaacattaaaaagcatagaaattcctggaactggaaagggcgtggagaaagaggaccctcataaggggtggtgagatcgctaacgtgtagaactttcctgaagcacaatttgacaatatacattaagaaccttaagactctgcattcctttcatcagcagttacacatttaggaagtttttctaagtaattagttatgcatgtgttataaaaggagaccgatcaaatcataatagacacatttaatataagcagccctcaaaaaaattgacataacactgtaagatgagaaaaggattaaaaagcatagagtttggaaagaaagaaatcaaactactaatattttttacagttgaaattattttgtattttggcaaaaatacagagaaaacatatagtcagttggatttctacatcttagcaacaaagagttaaaattagaatttaaaatactgtttcaatagcaaataacaacaaataaaagaaccaagggataaattaaataaatgacttttatgaagaaaaccacaaaactatactgaaagacattaaagaagacacaaacaaaaggagagagatacagcatgtttatcaaagaaaaagtcaatatcgcaaatatgtcaattctcccagaatattctatagattaaatgcaattccaataaaaatcccaacaagtggattcttaagtatacagtcaaggactcttcaaaaaagtagggaaggaggcttacatcatcgcatatcaaaagttatgaaagctgcaggcattaagacggaatggcattagattagggaaagacaacaaaagaccaatgcaacagaatagagagccctgaaactggggcctgttgaggcatgttccaaaggagaggtggctgtgcagatcaacagggaactatcccaaacgctcggatatttcatattcataagtgggaaaaaataaagcttacttcacatcacagattaagaaccacttcacatttaagtccaaatccatttcacattaaatcctaaatataaagctagagattttacaagaaaataggaagaatagcataacgatatcaggttaagagaaggatttcttaagcaagacaagatacaaattgcaatccaaaaagaagatggggccgggcacggtggttcaagcctgtaattccagcactttgaggggatgaggcgggctgattgtttgaggtcaggagtttgagaccagcctggccaacccggtgaaaccccgtctctaataaaaatacaaaaattagctgggcgtggtggtgcacgcctgtaatcccagctactggggaggctgaggcaggagaatcaattgaacctgggaggcggaagttgcagtgagctaagatcacaccactgcacttcagcctgggcaatagagcaagactcagtctcaaaaaaaaaaaaaaaaaaaagacaacataaagaaaaagacaaactagacaaactacaaattgggaaaagatatttccaacacacaactgttgaaagattaaattaataggccagagatataaaggtattttaaaataaaatacaaatactctaaaagaaaaatgagctaaagacatagatatttggctaggcaaagtggctcatgcttgtaatcgcagcattttgggatgctgaggtgggaggattgcttgaggccaaaagtttgagaccagcctgggcaacgtagtgagaccccatctctacaaaaaaataaagacatcaatatttcacagaatggaaaacacaaatggtcatttaatatttaaagagcatataaaatgcctaacttcattaagtcatgaaaatgcaaactcaagctacaatatcattttattcccatcagactggcaaatttgaaaagccaatcaatacgaatgttgtcaaggatgtataacattagacatgactggtttgacactaaattggcattatttagtacagtggaaaatgtgttcaccaccagcccaccagcccaccagcccagctcttccactcctagacaagatcccagagaactcttccacacgagccaggagacatttacaagaatgttcatgcagcgccatttgcagcaaacaataaaggacacgaatgtccattgacagaatggctaaattgtggtatatccatatgagagaatactttgtagtgtgaaaagaataaaccaaagccaaatatatcaataaggatgcatctcactaaggatgtaagaggaaaaagcaagtcacagaagactagagattctatttctacagagtcaaacacttgctcagagttcataaatatacacaacatattgtttagaaaaactggctgggtcggtggctcatgcctgtaatccaggactttgggaggccaagacgggtggattgcttgagatcaagagttcgagaccagcctggccaacatggtgaaaccctgcctctacttaaaaatacaaaaattagctgggcatggtggtgtgggcctgtaatcccagctacatgggaggctgaggcacgagaattgcttgaaccctagaggtggaggttgcagtgagtcgcgatcatgccactgcgctccagcctgggagacagagtaagactccctcaagaaaaaaaaacaaaaaacatataaacatatggtaaaagctcaaagcaaaaaaccccaaaacacaacacaacgaaatgcaaaaggatgataaacgcaatacaggaatggtcagggtgggtgtggggagctgaaggtgggaagatgagaagatagggtgggtgaggggctcaggagggctccagtgtgtaaggaatgttctgttagctggacggtgggcacaggggtgtctgggtttgtgtgtgatgtgtgcgctttaaaaattctctgaagtgtacgtatgtcatgtattaatttatatgtattaagataactgaggtgaacttttaaaaacatgtgattgagaaataggattagatattaaattaaggcatattggaaaataatatcaacagatactcactaaaaattgcatttatatgcaaagataaaagactagaaacaatgtttttaactgtttatctttggatgatagggttacaggtgatttttcttttaaatctgtatttttaatatttcccaaaaggaacaaatttgaaataataagaaaagcataaagtttattatatacagaaaaaagagagtgtctggataaactattaataggtacacgaataatagctgtttaatgcaagaccatgcctggaagtgaatgcattttcaaagaaattatttttagctcaagggcatcactttgggatggtagaaatttagacttctgacaagtaggtctgaagctgtatttctggggaggtgaggattggtgggtgtaaggtctcttgccccttaaccgtgggtcggtcttctggtagcttaatgtggaaaagaaaaggtactgctaactagaaagttacttcattactggagttggataaatgatatttattaataggaacaggtatgcattctatgttccattttcctctcgtttttacctttctaattcacagcccacatgagtcatgctaatatacacaaagagggctcaaattccaagaatcaatttccagatcagtaagccaagatcagagcatggtaaacacctatcataaatgaaatggtagaatcctgacatggtgtttaatgatggctttacaaagtatcacatttcatagctgtgaactatccccaaatcatctcacaaaaaaggaaagatcaaagaaaagggcaattcagaaaagatcttatttctctctctctcttgcatgaaaaagagcacataaaatagaagcagtggttaccccagcgtggcccttcagagaaccgaggtaactatggtaactaagaacggtcttttagttcgcaaggttcgaattctagaactgttggttggatttggggtaagtcccataagggagagctgcgaacttcaagtgtggactggttcattctctagggagatagcaaccttttcctaaaaaatcttggttcttcattgctggagagaagaacaagccctgtgaagcagtcagagatccttatacccagcagacttaagggtgtggtattcaaggaaaaaaacactttgggaaatagagaagaaactgatcaggaacaccagacttttctttataaatacgtatattttaagagcaacaaaacagagacaattttctcaaaataagcaaccactaaaatgtcaaggaaggacccatttatgacttaaaattcccatggctctctaacgaaagcaatgctaattttggccttgggaaagtggaaaaaatatataattatgaaaagtcctcacctttcttgcaatttcttgagtttctcagggtctgcctttatcttactggtttccttttcatctgtgaaaccagaggctgccatcctgctcccattatcattttgatttgggaaatgagacactgcaaagaaagtaaatggtgtattttcttgcagagacccagacacatgcaaatggccttctgagttcattcttgatggagaggagctggaagaatccactaaggacaaattgccctgtggatttagtaagagatctgtatatagtggagccccctgaggctggcttgttaaagtagtatcttctgcttccctgacagcaaattcgtgtgcactgtttactgggaaataattatggttttcggcactggcaaatggagtcctatttctaatgggagacagtggttggcaaacatgaaaccctgagtttccctctgagtctgagctgtgaactgaagtcgatgacattgacaagtctactggaatatcatctctcagagcagaatgcatgaatgatgcaggagggttataggatgaattcactgatgatcttggagatattggtctgccagaaataaagtagtcaagagaattttgagaactgtttaaatagtctttccagtatccttcagaatcatgggtgccaggcctatgttccacagaaatacaatcactccatacattttcagcattgacaccaacctcttgtctgggctcggatttggtgtcccacgaaagagggctctttttcgcattttcactgccacctctgtccttctctgtagcagattccctatcaggcagcccggggtcttgggacaacctttgcccagcagaaggccgctctgttgctggctccattgcattgcttattctcaatgagccatgactgggctcacttcttcttgaagaatgacctctgcaattttcagcattttcttcaaaatttttatttttggcctgaggggtcgatgtccccccaaatctacttcttttgtgatgggaaggagaacagggtgagcgcacaccaacccacagacattcttcagactgggtttcctcttcagtgtcatcgctttctcttctgctgttcaatgacaaaatggaataaaagtcttcatctcggaacctaaatgatgcctttcttggccctcctacagtggtgggtgtgagtggtggccccgagaactcactcaatacttgaggactattttttccttggaaggcctgggacagggctggatgcagctcactctgggaaggagcactcgggtctccttttttggctctatcaggggcgttctcagtcattggctgtgacgatgggaccaagtttcttctctcttgatttggcctcttcagcttagtgttacacatcaggccttcttgttgaactacttgatctgcattgagaaaagacacatttatcgttccagtaaaagggcccatggatgaaaggcctctagcaccaagtgcaaaattgccctttaaatgcaacagacaagacctagagaagaaaacagacacggtcaaaatggctggaggtacaagaggagcagagcccagcaggcttcattttactgccccgtattctcctttgtacccctgtggtcctagggaaatggggggaccctgaggatacagattctttctgcagaagctcccggaagactggcccagccccagccagtcaggactgatgatgcgcaaacctcacactaaatactggcttttgttccatacgtactgaaagggaaaaccaccactctgggaatgacttctacaaaaaccaccagccctttctcatccacgttcattcaatgtacatttatgacaccctgcctcccacgcagctttacaagaacttaagagaagtataacatgtcttggcagatcaggaggaaggctataggagctggcgcccggggaacactggggattttggtcatgtttactatttagtgaaaataaaaattataaatcgctcatgaaatcgttatcttctctttgtcactagccccaggtcaattctgtaacttctggctgccctagaatccctactatgaattcctacacagaatcactgaactggccagaagcatgctaactgtctctctctgtctctctctgtcacacacacacacacacacacacacacacacacacacacaacttaagcctcacaaccctgtgaaataggtaacacaatcatacgacattataacttgagagtaccaaggcttagggcagtcacataactagcccaagatcctatttccagtaagtgatggaatgaacatttgaacccacgcctgctcgatactagggtttgtgttcttaaccaccaccctgtgttagcccttaagaaactggctggccttccgatttccttgtgaaaatgagaatccattgaattcatcgtggtgtgtgtgtgctgttgagggtcttttaccctcttgatgtgagaaggaaactgacagtacttctctgatgccacttacctttattccctcctgacatcggcctccccccgctttgttctcctctctgctattgtgtgggatctgatgagatgctgctctttttatcattccatttctaaagcggttcaccctgtagagtggacgggactccacgggccctggaaggtctgtgttgataacagctcgggctggtgaaatgcaaatcctcagagcatcgggcaccaccaagggccaagtcaattctggctcactttaattggggctcctcacagggggacaccagtgtgagtctctaatgtcctaacactcgggcagcttcttttattgttaactgcatgggacactcagcaacgcagtatgaatcttgactcatcagctcttctagaaatcagttaagctctcctctcaggcccctcctgggttttataaaccccagttagagatgcagcagcaattcaaggatgctttgagcatctggctgtggaactacagcgctggagctggtggcgaggccactccagactgggccgacccccattttgggaacaaatgcttctacgtaagcaactgaattctcctgaaaattttttaaaatagaaaagggggctgggggctgtggctcacgcctgtaatcccagcactttgaaaggccgaggtgggcagatcacttaaggtcaggagttcaagaccagcctagacaacatggtgaaaccccatctctactaaaaatacaaaaattagccgggtgctgtggtgtgtacctgtaatcccagctatttgggagactgaggcaggagaatcgcttgaacccaggaggcagaggttgcagtgagcccagatagtaccactgcactccagcctgggcaacagagtgagactctgtcttaaaaataaataaatacataaatacataaatcaataaaatagaaaagggatccagaggagttggcagtgcaggctttggctgatgactttttttttttttttgagacagagtttcactctttttgctggagtgcaatggtgcgatctcggctcggctcacagaaacctccacctcctgggttcaagcaattctcctgcctcaccctcctgagtagctgggattacaggcatgctccaccaagcccggctaattttgtatttttagtagagacagggtttctccatgttggtcaggctggtctccaactcccgacctcaagtgatccgcctgccttggcctcccaaagtgctgggattacaagtgtgagccaccgtgcccggccggctgatgactttttgttttgaatttgttggagggccttggaggtgagctcacagcgctggaaccggaatcttccggtcattccctgaacgcacatgacccatccctgtgaggagaaacacccaatgggcaaaagaatcagcaagggccgcttttgaaaaacagaaactggaagctcaacgggagccattagctcatctcatagaggccactgagttgccacagagtgatgctggcctgggggacagaagaagtcccagggtatgcgcggtgttgcggctcctgcagattcctgaaacatgcatcttcacccctgtctcgtcaccacaatggtcttcctctttaaaaattcaatcagagcttctctgcagtgtgtgtgtgtgtgtgtgtgtgtgtgtgtgtgcgtgtgtgtgtgtgtttcccctaaaggtggcagactgtgccattctcgatttatgctattttaaccctatttttttatgtctatcaaatagagagcagatttcaggagctctagggctgggaatagacaggcacactggtatgccagggatgtgctattcatagaccaggccctgcagatgctgcaaatgcttctctgaggccctgggctccagctgtgagtgaagtgcctgccatctccaggagttctagggcaacagaatgaaaccagaacaagcatctgtctgccttaagactatgccttcgacttcttggtgtgcttgaccaatagtttcctacattccaacagccacacacttttaacttttttccctctggttataaaagtggtttatcatcattggagaaaatttggaaactatagaagaagatgaagaataaaataaaaatcccccataatccaaaactcggatgatcattgctattgttctggaattcagagtgggttgcatactcaagaccccagggctgttttcatcctgcaattgtgctttggctcagcttctttttttcttactttttttttttaattttagaaacagggtcttgctctgtcacccaggctggagtacagttgtaggctcaaacaatcctcctgcctcagcctcctgagtagctgggactacaggtgcatgccaccacacctggctcattttaaaatttttttctagagatggggtctcactttgttgcccagtctggtcttgaacctctggcttcaagcaatcctcctgccttggcctcccaaagtgctgggattacaggcatgacccaccgtgtctggccatggctcagtatttgaacaatgaatttattacctttaggtggaacatgtatattgtagcttaccacaggctccataacccgttatgcatctgtcctgctatatccacctgctccctgaaggcatttgaatttataacccagggctctcttatcaagagatatttcttaacaaacaaaactgaagtgaagaaattaagtatcttattatgagcattatgccatgccattagctattctttaagaacatgatattaattatagtataaaggtatatattataatttgttaactcttcccctattgttgggtatataggttgttttgaggtttgactgtcagcgattacaatgtgataaatgtccttgctcatacatttttgactatatattttcttagactagatctatgggagtgaaattgctaggtcaaaaggtatgaactttctaagaggctttgacacgttaccaaattcctttccagagagtttttaccaaatgacccaacaggtaggctatgaaagcatctctctcataactgtcaccagcaatccatgtcagtagcatagacacaacagtgcccaggaatgttcgttgttagtttcactactagtattacgtatcatttttaaaaccttagtcaaatgggtaggccaaatttacgtcatgtagatttacatttattaccttctgaggttgaactttttaaaaaatatgacctatattgtctccagatgaactttaaaaaaatgtttattagccatctgtatttttatttttattttttttgtgagacagagtctcactctgtcacccaggctggactgcagtggttatcttggctcactgcaagctctgcctcccgggttcacaccattctcctgcctcagcctcccgagtagctgggactacaggtgcccgccaccacgcctggctaattttttttttgtatttttagtagagatggggtttcaccatgttagccaggatggtctcgatctcctgaccttgtgatccacctgcctcggcctcccagagtgctgggattacaggcatgagccaccgcgcccagcctggaaactgtttttttttctttttttcttttttttttttgagatggagtctcactgtgtcactcaagctggaatgcagtaggcatgatcttggctcactgcaacctccacctcccaggttcaagcgattctcttgcctcagcctccggagtagctaggattacaggcatgtgccaccacgcccagctaatttttgtattttctgtagagacagggtttcaccatgttggccaggctggtcttgaactcctgacctcaaatgatccgcccacctcagcctcccaaagtgctgggattacaggcatgagccaccatgcccagcctccttccttatttttctattaggtatttgtgtttttcttattgatttgtgagagctttctgcatattatctctgtcatatttgcttcaactctttcactgatacaattcaaatacctggctcctactccattttgtgcaaaccactttagaatgtgagaaaagaagctaaagggagacttgtgaggaaataatttggggagataaggagccacgggtataatgggacattaggatgaattctcatcaggtcacaggatgatgggcgatgactcctgggtgcagacagaattgtatgagtcccatccgtgggtccaggaacatttcacacatggagacgcttacctttctccttccttccttccttcctttcttttttcttttttcttttttttttttgagaaagtgtctcactccattgcccaggttggagtgcagtggcatgttcacagtgcactgcagcctcgatgtcctgagctaatttatttattttttttggagatatggggtttcaccatgttggccaggctggtctcaaactcctggactcaagtgatcttccacctccgcctcctatagtgctgggattacaggggtgagccaccctgtctggtgaacctcacctttcaaataatattcaacagttcattaagggttgttggcaggagagaaactataaaaagttcagtgcccactgtgtggacttattctgtgctgggtgctggtcagtgtattattttacttagttattataacaatgcaatgaggtagatttcattatccttattttaagataaaggaactggtgcccagagtggctactttagcacccaagatgccattgctgggaggaagagctggcattggagctgaaggctgccttaaagctcatgcccttcccggcagaaggcattgatcactgggaccctgtggacatctccttgctgcagactcatatatgcagattccaagccatcaaaatactaacacattcttcaatatgtatatatgtccaccaccatctatatcacatttaaaaacaaaggcaggccgggtgccatggctcacgcctgtaatcccagcactttgggaggccaaggcaagcagatcacttgaggccaggagtttgagacgggccaacatggtgaaaccctgtctctaccaagatacaaaaaattagccgggcatggtggtgcgcgcctgtggtcccagctacttgggaggctgaggcatgtgaattgcttgaatccgggaggtggaggttgcagtgagtcgagctggtgccactgcactccagcctgggcaacagagggagactctacctcaaaataaataaatacaataaaaaaataaaggcaactgtgttcattggtcatgacataatgggatgctcagtggtttcctaagagaaagaatgggtctatggccaggttgactgtgaggtgatgctttccatgagttccaagggggtgatacaccaaaccagtctttgggaataaagcatagattcgttccaatattgtgtatttctcacacatcatgatctctctgagttgagtgccctgggtcagaggggagaagatctctgctgggaggtgagcagcctgtcacccacagacacacatcctccctatcccaggaactaagtgagaacaactgccaggtgggacatgccccagagttgcagatccgcttctctgccttccccaacccctgccatctaccacccaaatgccatccaccatccaaatgccctctggagcagctgtacagctggtgtccactcaaaaccagttacactcatggagttatgggagagaaaaagatatcccccccgaccccgccttccccttttcccaccagcctctcttggaggaaaaaaaacgccaaaagccctaggatcatacaatttgcttttaaagctgtttcattttaaggtacatgcacctcatttacttaaaagtacaagtatctaaaaaccataaagaattcaccgggtaacagcaaaaatcagtcctcctctccaaggacaaaggttcgggagccccgggtccttacctgctcccctgggaaccggcacctttgcaggccactgctgtttctgtctgcttctgtccccagatgctctcgggctgtgcgattctgggctgactgtaaatctcctcaggtttggcttcctctttcttaataaaaccattggtgcttggtctgctgaaagatgcaaagtcttttcaataattattttgtttacaggaaaatgtcttccatataaagaacgttcaaagggcccagcaatgtttgggggtggggttaggtggaagggcagtcaagagaagggacccaggaggtcacagaagagctggatttgaaatctggtttcatgtaaccatgtgagcttgggaaaatcacttcacctctccaagcctcagtttccctacctgctacatggaaataatcatgcctccttcataggatcacctgaggtcaggagtttgagaccagcatggccaacatggtgaaaccccatctctacaaaaatacaaaaattagctgggcatggtggcgcatgcctgtagtcccggaggctgaggcaggagaattgcttgaacctgggaggcggagcttgcagtgagccgagatggtgccactgcactccagcctgggcaacacagcaagactccatctcaaaaaaaaaaaaaaaagcctccttcataagcacccatgatgcctgcgatgcagaggccgaaggtagggatctttccttttgctaagaagttttgtctttttttctttttttttttttaagatggagtcttgctcttgttgcctagagtggagtgcagtggcatgatcttggctcactgcagtctctgcctcccaggtgcaagcgattctcctgcctcagcctcctcagtagctgggattataggtgcctgccaccatgcccagctaattttcgtatttttagtagagacagggtttcaccatgttggccatgctggtctcaaagtcctgacctcaagtgatctactcagcttggcctcccaaagtgctgggattacaggcatgagccactgcgcccagccttgctaagaagtttctaggttccaatccataggtgttgggatatgcccgctagcaacactgtcaagagccttctacagttgggacacgcaatggccctgcctcccaagtgctcatccaggtttgaatcacaacatattttgtataatacctgcatatttatatcctcaggtttattagcaaacatgcccgtacagaaaggttgcaagcatctgggaaccgtatgcctttctctttcctgtcccctaccctccactgtgttgggacgatattcataggaagacagtagctggggtgctattgtggacctagtttccaatgaacattatctttttaatctacattttgaattgggttgctaattgatacagttttgagtttcctcttcacatgtatttagcgtcagtgcacgtgaatgtggaggaaaagttctagtatataccatgcatctctacaagttcttgggtttacaaggcagttacatcgtgaatatctggacgaaattccccaagatcatttgtctggctcatcttctttagacagtttggaaatttcacaaatagatgtagccagctggtaacatagggataaagccggggaaagcccccgacttgtgtgtgagagcacagccttttttggcacatgaggcaactggagtcatgttccagagtgtaagttgtagtcgtgtgaatagttttcctccagattcaggaagggaattaaagttctttctggcagcccatgaaacctaatttaatacaatgactaggtctacttacttctgacgggccccaggagggcatggcagtgggtcctgcaggccaagacagagaggatcatgccccgcagggaacttactagaagagggaagctgctggtggtgtcggagcaacttggggcaagttggtggagcccagagaagttgtaggtgtgaaaggagagagtgaaagttctctggaaaatgagaagatagtcttgggatggcgtaggatgttgattagacatgattttgctgatcaaaaagggggtgagaggaggaaggtgagagagtgagagacagaaagacagagagagagagagggatcaggtgttttacactaagggatccatcactgagggaaggagggaagcattttcccactaccaaaagttgcattccttgaacatagaagcttctcccttatcacctgagacctcagaccccctcagttctcagaagtcctgcctcctgctttccaactcatggagagaagaggaagaaacagaagaagggccagggaaggggcaggcgtggggctcaggccaagtctagaaggtcaggacctggccccaaggtcctgaggataagaatttcactttgatttccagcaggaatcccagcagaatattcaaagttcccacgcaccccaggcagcagaacttcacactgcccagaggccactgagccccgccactgcattcaccttcacagggagggatgcttctgctcatgggacctttcttccccagactgcaccagccagaaggtcctccgaggtctgtttccggtttattccaccaagtcggctctgactctgctttggaaaaaacccttactttcagcgtttttaaaaaatggcctttagtgtttaaatattctaaaattgcttaatgagtatgtcttttctctccaactagcctgcacgctccttaagaatgaggatcgtctctcagccagtctacacgttgcctcatactgctgtgcaggacaagtattaattgccttgtcgtgcaggacaaatattagtatgatttgtgaggcttgagaagatgcattcagcccaactacaggggaacttcaaaactagaacacatttttttgttgtgcagaacgcccaagatggcttaagataaaaggttatttaatttgttttcttgttcaaaaaaactgctttcttcaaagcatcagatctcttaaatgattgccaaaaccattaccatgtgtcctctaatcaagttctcagcaaactaaaataataaagctgaacaactggagattgttgtactaggcctggcagtgaagaaatcgctgctattagtgtaggcaggatcctctgacctttggcaactttaacctcagtttctgcaactgtaaaatggtccatcttgttactgtgaagtttagcaaaaatgtacataaatggcctaactggttcatgctaggtgctaataatggtagctgcttcttctactgtaaagaatactaccactactactgagaataataatgggaaatctgaagtcattcccatgagacaactgaatttgaccagaaactcattgttatgcagacttcacaggttggcaataacttattcaatagccttcattccggtgtagttcttgttgattctctccctcaatccttcttttataaaatccaaaaggcaaatagcaactctttatattatgatttgttcaacaaatacctgtgtgcctttgctatgctataatttgagggttcacaaagatgaacaagatgttgcctcatgaccttaaagattattataatctaatttggctgcactgctgacttcttccctgtgatacccttttggttccatggaaaacaaaactcttgcaaaatattttctcttctctgtctgtaagtgcagtcacaaatgaggtgacctagattgcacagtttgtgtgtacatgggtttaagagtttctaggtccaggcacggtggctcacgcctgtaatcccagcactttaggaggccaaggtgggtggatcacgaggtcaggagttcaagcccagcctggacaaaatagtgaaaccccgtctctactaaaaatacaaaatattagttgggcatggtggcacgcacctgtaatcccagctactacggaggctgaggcaggagaatcacttgaacctgggaggcggaggttgcagtgagccgagatcacaccactgcactccagcctccaggccgggcgacagtgcaaggctccatctcaaaaacaaacaaacaaacaaacaaacaaacaaaaaagagattctaacattcagccaggcatggtggctcatgtctgtaatcctaacactttgggaggccgaggcaggaagatcacttgagcccaggagtttgagaccagcctgggcaacaaagtgagactcctgtctctacaaaaaaagaaataaaaaatattagctgggtgtgctggcacatacctgtggtcctggctacatgggaggctgaggcaagaggaccatttgagccccaggaggtcgaggctgcagtgagctgtgtttgcaccactgcactccagcctgggcaagagcacgacattgtctagaaaaagagtttcgaaccctcaatttgtataccaagttcccatcacttcacttgcatgaaaagtgaatcaaatttcagacctttgggggctaggatgggtctttaccatgtccatggattcataatctgcaggaagaccaagtcctatttaccctggacgatgaaattaccttccttttcaggtagcaggacaagccctttgccttacagaaaaggaaggggtttgtgttcaggagtttcactgccaggtaactcaatatcctgtttatcaatgaattttgggaagactttggtttgctttggacaacatacagaccccctacttccaggatctgagaaaggtgatgcctccagttttaaagaaaccaaacagctgtttagattaaaggcatctgcctctgttctcttgacaatgttgggaaactgtgattgtcgactgaagacttcttaatttgaccaggaaagggaaaaaaaaggtagaaatcttatatttgtacaagaccctgacaagtgagaaccaagtccattcagctgttcacgttcggctcttcccaacacttgtcatccacagatagttctttatagacaaagtcaaaaaggaagcataaaagggaaatacagttccggaacccttatcccgccccacattactttgactgggatctctggtgcctaggaggtgccaagatcccaatggagagacaactctttgaaaaaaaaagtgtgctttctttggatcctgggaagaattacagcttaatcgcaggagccaatgttgccttggggtaataggcagctttctgtgcagtcacaaataataggtcgcgtctatttgcctatttgagtgtgcgagaaatgtgtgttgtctcatgtacccagaggagatcttaattaaagcttaattatgtaccataaatatgttttattttggaactcaggggtgggatttttgattttaggaaatgtgatgcctaataagtaggcaggaaagggaatgtaaacatcggctgagccttttcatttgtccctcctccgagtggttctgaatgggttttggttccagtgtgtgccttcagaacggcctgcccccggtgccaccgctcagggcggcctcggcgtgtgcacattcacatagccaagggtatgatcagacgcattaggagagcctgtttggtttctgggggtgacattgcacagcgtgccagctacaggaggtaagaaatcaaatgagtctccagagaggatgggattttattggtcgctcgctcctttggcgctagaaggtgcagccccagtgcagtggccacgctgtcccatcttcctgctcccccgaacaccacgccgcctggtattgttcttggtgtggcctctggcccctctcctgtccacctgccttccggaagcccgaagtcccctctccccgactgcgctgtgctgtgtgccttgcaagagtgacttaccacatgaggtaaatcctactgggccttctggggccctgaaggcacagcacaggggtctcagccggagtggggcaggagatggggaagtagcacagcacggcgggggactcgggcacggggtccggggaggtggaagcggtgcttgtgaaggagggaacggtaaccagagggagaggacagtcaggaggttcctgggccactggggaggcaggtggcactagtggcaggaggaggcagcagtaattggtattgggctgcaggacaggggagaaagcaaagacggagcagtaaggggtgtattcaacacagaacagggggtgcttgctgctgccacctgcacaaaagaaaaagagcagtcaggaagcagcactggcggtggggggaaggacatagaaacgtctgcgaatgaatccaaactcaaaaattgttctccaatgtcataggagcagcaggcctggctcctgcccaggaggcacctggcctagatctcagcgtcactgcggagttaaccaagggaagcggcaccagcatcacaccctgttccagccaacagtctccagcgtccctgacagatgtcgggaagttcttttccccgtaagatcccggagaatgtcctgaggctgccgtgtggaagctctggggcctttctcgtctcccactgccagcttaatgagctgtgctggtagcaacagatggcgccccgcagggtctcacttgggtaaggctctctccctcaatcctccagctgcccccgctagcaggctgtagtcatgccctgatctggcctttctgctgcggaggggaagcttgggaaaaagagaaagaaaggagagagatcccggcgggatcatgcgaagggagaaaaatcaagctgggtgaaaagcaggtaaacaagagagatgtctcgttgaagctgatgatctgttcactaacctcacgctcaaactgctaacctcgctggaggcagaatacgggtgcctgatggagtcatgagtcagagctaccccctcacgcctgacaaatctcagctttgccactaaccagctgggtcaccttgaatcgacggcttacctgcccggaacctgtttcctcacctgcaaaacgagacgggtgttttttctagccttgctccttcaaaggtggttcacagaccagccacatcgatgtcacctgggacttcttagcaatgcaggatctcagcccacccagaccttctgaatcagaatctgtagttgctcaagagccccaggtgtttctcatgaatgttaatgtttggaaaagcaaggatctgagacagctgcccaaaccctggtgatgagaatcacctgttgttcttgttcaaaaatagtttcgcaggcccctttactggagattctgatgctgtgggtcagggacaggaagcaggaatttttatttttatgaagaacctccctggtgatttttattgtcaaaaaagtttgggagatgctgcagctaaaatcagttccaagtctaaaatccacagttgtagccatccagttgaaaactatcacctaaggctgggcgtggtggctcacgcctgtaatcccagcactttgggagaccgaagcaggcggattacttgaggtcaggagttcgataccagcctggccaacagggagaaaccccatctctactaaaaatacaaaattagccgggcatggtggcgcatgcctgtaatctcagctatttgggaggctgaggcaggagaatcgcttgaacctgggaggcagaggtttcagtgagccgcgatcgggctattgcactccagcctgggtgacagagcaagactccatctcaaaaaagaaaaaaaaaaaaagaagaaaagaaaaccattacctatcgtggaggggtctcagtccttagtgccatgctacagaggattcgagtaaatattatccacttctttcttcctaaatggcctctggagtggctcctatttctcgggatcatttttctctctctagctgtcttcactcattcttctctttacagttgttatctcccaaagtccccccaacatctctcttcttactccatccactcaggggagacattcttgccatttcagccacctcttactcactgcaggcccttgggtcctaccagcaagtgctctgggaggaaggggagtgctctgttgggcaggagacctgggtccccaggtgcttcctggcattgccacctggctgccctgcctgcagctcaaaggcaacaccgcaaaaggggacccaccctctccttgcttcctcagccttggcagaggcaacctccactgacctagtttcctgggccagattcctgagttctctttgattcctctttcttccttatccctacatccaagtcaccaagttctgccagctttacttcttaaatggccctcaagcccactccctcttcctattccctctgctttttttttttttaatagagatggggtcttgctatgttgaccagactggtcttgaactcctggcctcaagcaatcctcccatctcagcctcccaaagtgctaggattccttacaggtgtgaaccactgcatctggccctcttccttttgcttttgctcccgctcaagcccttctcatttctcccccatcccctgcaactgctacttgtctggtctcttggctgtgtctggccaccctcacactctcagctggcccttctccatgctgcagtcagagtcagcttttaaaaatccaatctgattgcatcactttcctatgcagagcccttccaggactgatgccccgtcgcctccagcatgacatttaaggcccttggaggcctgatccttgcctaccggtggggcctcaactttatatttcctaatttgtagcctgaccctaaaccagaaaccagagcttctctctctctctctctctttttgagatggagccttgctctgtcgcccaggctggagtgtggagtgcagtcacgtgatctcagctcactgcaacctctgccttctgggttcaagcgattctcctgcctcagtctcccgagtagatgagattacaggtgcgcaccactacatctggctaatttttgtatttttagtagagatggggtttcatcatgttgaccaggctggtcttgaactcctgacctcaagtgatccacccaccttagcctcccaaagcgctgggattacaggcgtgagccaccacgcctggccctaaaccacaacttctgaaactcaaatgtacataggaatatccctgagatcttcttcaatgcaggttctgagccagtcagtctggactggggcctgaggttctgcatttctaagaagctctcagatgatggtttctgctacttgcctggggacacttggagcacaaggccctagattatctgtagctcctcgatatgtgtctctccctgtcttccttgctccctctcctccgttcctttgcacactcagtacctgctgccaggcacatctttcttgccctcttcacctggttaaacccctgtccttcaggattttcactccacctggccctgcccacaagctcttagaacttaccttggtcagggtgcgccttgcactatctgcccttattggaatcctgctcacccaccaggctgggagccctggagggcaggccccgtgtgttttgtgttctggttccccattacccggcaggtaaatacgtataaatgaagtgctgaatgaatgagcagtggatgagtacaccagttcgccctggtatcatacaccctgggacgtgggggacagttggatgtatttgctaacatccccataggtactggataaacggatgacttcactgatgatcaaatcgttaaaatttttaataatcaaattataaccactttttttgttgttgttgtcgagacatggtttcactctgtcgcccaggctggagtgcagtgacacaatctcggctcactgcaacctcctcctcccgggttcaagcgattctcgtacctcagcttcccaagtagctgggattacaggcatatgccaccacactcagctaatttttgtatttttagtagagacagggtttcaccatgttggccaggctggtttctaactcccaacctcaggtgatccgcttgccttggcctcccagagtgctcggattacaggcatgagccactgcgcccggccaaattctaaccactcttacatctcaaatacaagtgtctttggtcaagcagtgttcttatggagacattagccctggagtagttggcggtgttgggaggagggttcataagcagcggaaggcctggggattaacctttgcctaaagcctggtctacatccagggtttccacccacctatctacctggtgagactggcaaggattccattttactgatgaggaaactgagttcagagaagttgtccgctcacatttatggggttataaagtgatagcaccaggatttggagccaagacttcattctgggctctgcgacaaccccgagcccccctgtcttgagagcatgtatcataatagagaatatgattctctattaaaaagtgggagtatccacttaaattgtttgtttttttctaacttggcagatagcttggaaagttcctggacaccagttggacttgccgcgaaaaccattaatctggcctttcagagaaaatcttcagaagaatgtatttgcaaggtgaattatgaggatttaggatttgccctcaaatttctctttcaggctgctcttcaaataaatatttccccatccaaaagagaccacagttattttagatgtttgtctcttaacatctgaatgcactgctttttcttagctttacaagaacctgtcctcacaataatccactctacagctgaaaagtcttcttactcctgcaaatctgaacccagtaatgactaacattgcacccaataagaagtgaggataatttcagaacacttggctttgctttaaagggcaagattttggaagcaggttcacaggactccatccagatctgtcttcctggcacacagctcaggggaccatgcccaagctccaggtgacagcagagggcaggagaggggacgcttgcttcccacatgtctggccctagggtagggagctcgttaggactccaggtgccagaatcccacagcacagtggcctctggatgccccttcgtgtcctggaaaggagaggcggctcctctccaactcagggtggggctgggagaggtcttgacagcaggcaggccttggaggccaccgcagctccccaaatgtccctgtgcctctgcactcgctgggcctgctagctgttctgggtctcaagggtatatatacaattctgaacatgtaactaagaacatgtaactccactaggctcatatctcaccctacaccagcgttcatgatgtgggatttctgagctgactgcacgtgagacccggccaggtcttgactcactgcctgaattttccacgtctttctggagataaagcctttctctggcttggtgaatgctgtctgattcttcatctttttccatttggcattttgctttgaaactcagagtgttgtaaaagtagttgtacctgcatttatgttagagattctaaaaaatacaactctgagctgggtgctgtggctcatgtctgtaatcctagcactctgggaggccaaggcgggaggatcacttgagcccaggagttcaagaccagcctgggcaacaaagcaagacctcgtctccataaaaagtaaaaaaaatggctaggtgtggtggctcatgcctgtaaccccagtactctgggaggccaaggtgggtggatcacctgaggtcgggagttcaagaccagcctgaccaacatggagaaaccctgtctctactaaaaatacaaaattagctgggcatggtggcgcatgtctgtaatcccagctactcgggaggctgaggcaggataattgcttgagtccgggaggcggaggttgccgtaagccgagatcgcgccattgcacttcagcctgggcaacaagagtgaaactctgtctcaaaacaacaacaacaacaaaacaaaacaaaaacaaaacaagtaaaaaattagccaggcatagtggcgtgtgcctgtagtcacagctacttgggaggccggggtcagaggatcacttgagcccaggagtttgaggttgcagtgacctatgattgcaccagtacacttcagcctgggcaacacagtaagaccccatctctataatcaatcaatcagtcaatcaataaaatacaactctgattttgtaaagaaaaaaagatgttttgggaggacaaccttaagacaaagaaaacaaagttttctagtcccatctcctcattacctgctgctgtcatgtgctaggaataataatgcaataattaattgagttgccacagcggcagggactgtcctaaaggctggatgtatgttttatcattgagttctcacagcaatcccagcaggcaggatctgtttctccccattgtacagatgaggaaactgaggcacagaaatgctttacttggccaaaggtagacagcaaataaatggggcccagatgcaaatgcaaacattttgactccaaaacacttgcccataaaccgcatgcgccactgcatggagagatataacaaggaccaccacaagtcactcatccagaagcagtttcatggactatacaaacttaatttaaacgtgtgaattccttctaacaggatgaagagcaatctgatgccttctcagttacaaatctgtttgtagagggcattgatagttcctatattttaaatagttgttttggaggttctagatggcagattacatacaaagaaaaatgcttttttgatgacatggattatcattacatagatttgcagtgagtcgagccatgttccccagctatatatttttttttcagtaaaagtctggtataacacaggaagttataccagattctacttctgtagcctattaggcagatgttgcgaaggaatttcactgtgtttgatgcttcaatttcgtacagaatctcaggtctgacatggaagaagttttgatgacttactgccaactttgtatcacccccaaaatgctttagagaaatatctctctacagaggaaagcaaggaactgtgactttaactagtgaattggatcaacgtgtccagctaattcaggtaccaaatcctatttttctgtaacagcagaaaactgtcacgactgccactgagctcaacttttcctgaacagactcagctaaaatccttgccatgtctcagttctcatttcactatgctaattagggagcccagagggtgagtctacacatgtaaaatggatggatcttaacacatcgatgctttgtttttagccagattgctgcacaactgattccacttctgcagcaactgccatccatcaccaggactgctctgcctggggacagccaggccacagccctgctgacgtctgcatgggtcttggacgtggtctagggccagaacgcagtgatgaagctggtggtttgtagaggcttttactacaagtaacatccctcatttgatgaaatagatatctttctgccaacttggctctgtcactgaaacctggtgtttttgtctggtaattcttcaaatttgatgttttaaagaatgttaagtgaattaattcctcctttttgtcagtgctataagttccatacagagtttgctcagtctgaagtacatctgtattaattagacaaactaaagcattgggtggatctaaacggttccttttaatgatttttctccacgatgacaaggcacactatacaaacaaccacctgattttagcaagagggctaaaaattatattgcataaatggagttgcattatttaaacttaaattcaggccaggtgcggtggctcacgcctgtaatcctagcactttgggaggcagaggcaggcggatccttgagatcagaagttcgagaccagcctggacaacatggtgaaaccctgtctctactaaaaatacaaaaattacccggaaatcgcttgaaccggggaggcggaggttgcagtgagctgagatcgtgccactgcactccagcctgggcaacagagcgagactctgtctcaacagaaacaaacaaacaaaaacaacaacaacaaaaaacaaaaaaaccctgaaattcaaacttttgccattaaaaacatcctcaattcgataaattacaacttgtattttgaaatattggtggaatgaccttacctgctctatttcaaccttaaacagctgaattaaaagcctaattcctaccaaaagtctttaaaatgagaaattaactgtgatgatactttcccctgattaaataagaagcaagagctggggctttgcctgagaggacatcatttcagaagtcaatttggttttgacttcgttaaagcaataaaatgtgggtggttaatctgagtgaaagctgccatgttctaaaaatgcgtgaagacttaactggatgggtggttgcaccgcagaagctatttaggattggaaagtagctgtgatttggattttaatgaattgcacactgttgacgaattcttcagcagttagcctggatcctttccactcaacttagacctttctgcctagttactccaacttaaacctcagttcctggaggaatcaagtttgtcttatagctgttgtctttgatggagatgagcccgagagacattaaagtttcagtgaattttatcccctttctggatactattaaatcactcctgccccaggcagaagactggtctttactctaaggcagctaaagagtgactatttttccaaattgcacaaaagggagaatttatcaagcaccttttctctcagagaggacaaacccagaacaggaaaactttattactttctctcttggctataaattatgctattcagatgtatttgaaagcttctctttatgctcttgcttgagccataaaacttgatacctggggccaaatgcctttatccccaagaagggtgaagaagatgaaaaggcagcagctctaggcggaagccacacaaatgactgggcagaaaatgcgggcggtggagaaagttacattgcacgattcatgcctctttgaccttatattctactctgaaattaatgttactgtttgcataggatcactggcctttcgaaacctgaattagccattcagaaaacactaggtttaaccaataccatcaatttgattgttgttgttatacttatttatttttgaggcggggtcttgctctgttgcccaggctgaagtgcagtggtgccatcttggcttactgcaacctccacctcccgggttcaagcgattctcctgcctcagcctcccgagtagctgggattacaggattatacctgtttaatttttgtatttttagtagagacaggatttcaccacgctggccaggctggtcttggactcctgacctcaagtgatccgccggcctcagcctctcaaagtgctgggattacaggcgtgagccaccgtgctcggcctgttgttgttatttttaataccgggattttagatctgatgaatttcaataagccagccactcacctggagagggttcgctggggtccactttctctgctttccttacagtcatggtacttttatgtttctgcttgactgatgtttggtcaattgctggaagtttggagtcacacttaaatgcagatatcttgatagatgaccttggttcagttagagcatcctcctcactagaactctaccaaaaatgaaatacgtctgagtctcagtggccaagtaggtcaactttgttaggcagagaaaacagaaatgaggcaaatgcagtgaccctctccagcaataatcctagagtcttctgccaggtcaacacgcccgttcaccagagagattcagatggactgggcagagcaacttagaaataatggcagagttagtgagtctgttttgtagaacattatgaaagaatgcatttttctgtgagtgtgttttgtagaacgttatgaaaagaatgcatttctgacccttaagtaatttgatgacagataaatagcgcatgtgcttttaaacttcttattgtttgttatttgaactactttggagataggctagaagaaaaaatgttccttatgttaatcatacatttgacaatgaaaaggaaatgtagatagtgtgacggaggcagattaaatcagacctcagtttcaatactctgcgttactgggtgcaacacgagacagactaatcttttaaaaagtcccctccttgtcactcttctataaagaagtcagtataaatctatgcatggacaaatcatgattcctgctgtgtcagaatatctcaacacagccatgccgacgcaataaaaattatccaggcatggaacagctttatacttggccacacttacacccaccaaagaaaggatgaaaacaatataaatatcagaaacctggtcttaaaggtgatttaagtacagcctgatggctttaggtcctggtgttggtatgacttgctaggctatccattctgcaacaaataaatcactaggttcccccttccccgaccctggggggtcgttgcggtgggggtggaggggggcactaagctctctcctccattgcacattagtccagtgttggaaagtcctgtgaaaatgtggtcttttgcaggcatagaatgctaaattaacatccctggtacctccccaactgttgcaatttgtattgatcttgctcaccgttctccctgtcagttgtggcattttcatttcacaggctcctgactcaggaaaatactctgagtagctttgaattattgggtgtgatgtaagacaaactaaattctaaaaaagtcctctacttgtcagtcttctgtaaagaagtctacataaatctacaggtggacacatcattatgctccaagatgatgaatcatattttaaatttagagtttggatacagccttcaaacaaataattcttgtttctccgcacaatttcagaaaacagaccaccctcagataaaagaaccagaaaagcacaagacacaacaaactgactgttctcccctttccttttcgattttgctatttaattgaaatccttgcaaataactctgaaatgtcaaagatgaaacattaggtcatttcttttttctttttttcttttttttgagacaaagtttcactcttattgcccaggctggagtgaaatggtgccaccttggctcactgcaacctccgcctctcgggttcaagcaattctcctgcctcagcctcctgagtagctgggattacaggcacccaccatcatacccggctaatttttgtatttttagtagagacggggtttcgttatgttggccaggctggtctcgaactcctgaccttaggtgatcaacccatctcagcctcccaaagttctgggattataggcgtgagccactgtgcctggctaaaacattaggtcatttctgaacatgagataggttctctattctcagaaaagaaaatgcgggcacattttaagtatgacacctaagaatgtcattgtaattgggtcctggaagtcacagtcctggaactgggtcccaagaagagcatcaatgaataagggacagaatttcttccataaactgcccaacaaaatcagctcactgcagtgggttaagtcaactcccacagggccctgcaagtgagccctttatttccagccagcagaaaggcaggaaaaatgctccaggcgaggatgaccaacacctgtgtcagcagcagtagcagcagcagcagcagcaggtgtccgctcagctcatcttcgcggatccatttccattacccccagccagggccggaattcttggcttgccccaggctgtggtgaatagggaggagacctttattggttgagctgttaagccacgtttatccttcctccacccattcattaaacctcaagcctttagtgcactgaagaggtgaaagcttggccaattaaatcatcctgttacctacgggattgtgagcctacattgtgaatacatccttctctggttcaatcaaccttatttctaggtagtaatcattaagagtctagaaattgcagctagaagttggtgttttatcagttgtaaaccgaaggtacaatggcaagaagtgtaatacttacaaatgtgttaatggacttttttcctgcttgcctcattgagaaatcttaaataaatcacgtccaccttttggtctttattctgtcttcttacgttctcagccattcccatctatcctctttctttcttttttctggagacagagtcttgctctgtcacccaggctggagtgcaatagcgcgatctcggttcactgcaacctcgacctccccggttcaagcaattctccggcctcagcctcctgagtagctgggactacaggcacacgcaccatgcctggctaattttctgtattttagtagagatggggtttcaccatgttgcccaggctggtctcgaacccctgagctcaggcaagccgcccgccttggcctcctaaagtgctgggattacaggcgtaagccaccacgcccggcctatcctctttcatgaaaccccatcgtatcacgcagggaggatcgtccttgagtgggagaagttgtagtaaatcatcctggcactaaagtgtggtacttaaggccctggagcccagctccacgggagtgaatcccagctcttgcacatagtaattgtgtgacattgggttagttcatttctctggatctcagatttcatttgtgaacaatagtatctaccttttggtggttttgtgaggattacataatatatatatgtacgcatagcacttagaacagcaccatatacatgtaacccagcaagcgccatgcaagtattggcttttataattagccattaattcatgttcagccatttataaaattaactagctaactactgaacatttactacctatggttgaaactaaagtcaaagtccccagtgaaaaatcctattggatttcacctattccaaaagggtggtatgaatggagacgtgggttagttccacaccagactcttggtttcttctccagggaatataatctataatagtatgacaatcttataaatggccagttgaaatttatctagttttaagaaaatatggtgcaatggtttttgagacagtaaagctctaatggcaaatatttgacaacattagagataatcaaacaataataattaaaattttaattttaaagttgatttttaaattgcatcttttcctcttgtaattttgaaaaataattacaattttcattccttcctcatgtgtccccaagttgaaatgtcacttggaggtggaggcaacagcacactgctattcctttgggggacgaaagccagctctatctttaaaaatcaaagcccacgacattaaaaacaaaccaaaaaccaaaataaaacaaaacccaacctacgtgacacttaagtatacttcacattctctgctgagaatctgatgaaagttctaacaaagccatgttaactaaaataagttgacgaaatcagtattttcttgagaatcgtcatttttgtacttaaggttttccaaagatcccgaacttgctctactggcctcatgtctaataaagtagagttatcactctgcccagggctacgcgctttcaaaagttcacagaaaggcccacactgaggagagaaggaacttaactgggtaagtagcattgggcagtgaggtaatgacatcatggttcaagtagatgtcctggaaggtgaaaacgcatgggttgagaagggggatgaatctcctcgggaatgtgagaatgattcaattcttaacaactaggacctaacaatatggtgtctgaaatgataaggcgacagtgaacagagatgacccgaagagcaagtagactaaggcagtcggggacagaaaagacttcaagttattttccaactattgcctgatggctcctttccaagaaccggcaaactggttcttaactgatatgccatttctgtccctccccgagaggtgctactgaattctgattgatgtgtaccgaacccatctttgccgtgagtcacgtgatggaggctgagctaagtggatctatgatatagtgcagggcacagcttgctgtggatgggagggaaaaggcaaagagtagtgtcaagctggcgccagactgtgttgagtacatttgaaatgaacttggtctcgtgagattataaaggagtgtgatcaaggcagtgaacctcaacctttaaacagtgacaacatgggaaggtcgatcaagggactgtgtgtgccaccttcaagagcactgtccccaaagcccacactcaaattgtgcttcaaacacaaaaaccaccttagggaattgagggcagcttgtataaatagcattctggataggacggctacctttacgtagtcatgaaatgtaaaatatgtcctgcacaaagtgctgttgtagcacgaagcaagcaaaactttctcttgtctagaaaaaaactcttacagcagcaaaatccctcctgtgcgttcaagacaattttgagtgtgccagaattgtacgcttggacaataaagaacgaggctcagtaggctttttggtctttctggactcaggtaccacccacctgaatcaaactgctgctgactctcatctgtctcccctatctgaagacgtggctgccaggtggagctgggtaagactaggcactacatgcccttggtctccattttgcctgaacatgctttttggaggccaggtgctgtggttcacgcttgtaatcccagcactttgggaggccaaggcaggcggatcacttgaggccaggagttcaagaccagcctggccaacatggtgaagccccgtctccactgaaaatacaaaaaaaaaattagctgggcgtagtggcatgcgcctgtaattccagctactcgggaagctgaggcacgagaattgcttgaacccgggaggcagaggttgtagtgagctgagattgtgccactgcactccagcctgggcaacagagcaggactctgtctcaaaaaaaaaaaaaaaaaaaaaaaaaagatgccttttggagtcagctgggctgccagattgcctaaatatcacaggcacctgtctaccatcgagttccacagagaacaccctcctgcctacaggcttctctcggattttcagtccagcaagttgaaacgacccagcctgtggccctggctggagagtggcctcggtgatttaagtcttcataacattccatcactacgggggtgccctctgaaggagaggcatgtgggtctgcttgctttgcgattactattcagcccactatggaacggccagagtgaaacttcgcgctgcaagttactgacatggcaagcaggacgtgctaggtacttcttatgatgccaggcaatcctttgtgtgctgcagaaatcactgttcagtttacttggttggtgaccacacatttttcccgcttccaaatactagggacacctgtctgtagtattatctggctgtagcaggagcagggttctgtgtggtgcgaggacgaaaaggaagcagtatgtggccaggaaattgatagattttaaaaaccggaatgcagctgggtatggcagctcacgcctgtaatcccagcacggtaggaggctgaggcacttgagcccaggagtttgagaccagcctgggcaacatagcgagaccttgtctctacaaaaaataaaaaaaaattagccaggcatggtggtgtgcactcatattcccagctactcaggaggctgaggcagaaggattgcccacgcctaggaggttgaggctgcagtgagctgtgattgtgccactgcactccagcctgggggacagagcaagaccctgtctcaaaataaataaataaataattggggccggacgcggtggctcacgcctgtaatcccagcactttgggaggccgaggcaggcagatcacctgaggttgggagttcaagaccagcccaaccaacatggagaaaccctgtatctactaaaaatacaaaattagctgggcatggtggtgcatgcctgtaatcccagctactcaggaggctgaggcaggagaatcacttgaacctgggaggtggaggttgcagtgagttgagatagcaccattgcactccagtctgggcaacaagagcgaaactccgtctcaaaaaagaaaagaaaagaaaaaaagaacgttaaaatgcggtgtttaatagtttaacagcacattgagattgcccttgacgtaggtgtctttcagatatggttttgctacaatgtgtttccccttcatcctttatttgaattcatattcttttagctgagaggagcatctgagcaacaccagggggcttggccatcaaatggagatcatcgatgaaaatgcttcctattcggaataacaggtcattaaacatggaagtcaattgagatgtatcatacgcgcctattatgtctttaacaccgtgctaggctctgtgaaggatacagaaataagctgacaaggagagagataagattaatgacttaccagcaaaacggaaaacaatgtttaatcaagggatacgttctgttgcacccattctaaatgtcatggaaaacccctgggaaaaggtgaaaggtcaagggaaggtggtggtgtgtgctgggacttgaagaatgggtggggtctggctaggctggaggtagcacatgagccgcaggatggatggagtgaaaagagcaggcgtgattctaggacagccaggcaggtggcttgagcatggggtgaggaggagggtgtgggccagattgtggggagccctgagattcaagcaaatgtgatagagagtggggtcccactgaaggtttctgagtagaagaatgcttaaagtagtacttacaatttagctatatgtttcttttagagagagaaaacaaaacatcctgcaaatttgccagtcaaataatctctttgtggtttcaatggtttatttttgtaaagcataattcttttctttattacaaaagaaatgcatgctcagaatggaaaaacaaaaacaagcataaagatatttaaaacattcaaaaaccaattaaccttgaaataaaagctttgaattggtgggtctgtattcttttttttttttttttttgagatggagtctccctctgtcgcccaggccggagtgcagtggcatgatctcggctcactgcaacctccacctcccaggttcaagtgattctcctgcctcagcctcccaagtagctgggattacaggcatgcaccaccacgtctggctaatttttgtatttttagtagagatggagtttcaccatgttggccagactggtcttgaactactgacctcaagtgatccacctgcctcagcctcccaaagtgctgggattacaggtgtgagccacctgtaatgcccggccctgtattcttttagacactttttaatgactgatggagactactacctttctagcaaaatcccttctaaatcgctaagagttgaagtcgggatgtgtggttgcccatcttgaactgaatcgttcagcccctgcacctactgccccactgcaactcaggagaaaggtctcacccaggggagtatgagcagaagcaatgtgtgcagcctccacagagaaaatatctggccctgcacctctgcctatcaccttcctgtgagctggagaacaacaactttgaaagtcatatgttgaagacggcagaaccagcatcagcctgagtccctgaaagtctgagaagtgctgcctgctgacctgcacatctcaccaggactgtcacgtgtgcaagagatacacttttatcttgtcgactgagccactgcattcttggtccctttgttacagcagctaacattactctaacatagaattgtaccattcatatgggccaggtgcagtggctcatgcctgtagtcccagtactttgggaagcggaggtgggtggatcaagaggtcagaagtttgagaccagcctggccaacatggtgaaagcctgtgtctactaaagataccaaaaattagccgggcatggtggcatgggcacctgtagtcccagctacttgggaggctgaggcaggagaatcgcttgaacctgggaggtagaggttgcagtgagccaagatcacgccattgcactccagtctgggtgacagggcaaaattccgtctcaaaagaattgtaccatttatactgttttacttaacaataccttgcagcaatagatacctttctagaactgttttcaactttattttgaaaagtttcaaatctacggagaaattgaaagaatagtacaaatcacaccctttattctttaccttggcaatttgctttctctttttatatatagtctttttctgaacattttcaaaatgaccacacttcaagatactttacccctaaatacttcagcaggcatctcctatcaaaatagacattctcctgcaatgccacaataccattattttacctaagaaaatttaatcgttccatcatattttctaatatgcagagcagattccaacccaattgtccccaagatgtctttttgggtatacatttggatcaatgattcagtcaaggcacaatgtctctttagttttttaatctagaacaattctctggtcttttggctttttaattatttttcccattttgaagtgatccagtcagctgtctcatagaatgtcttacgctctaaatttgattgctcctcataataaaattcagttcaattgttttgggtgtgattattttataggtggtgtggtgtccttctttataatatcctatcagcaggtgccttgttaggttgtcccaatattggtaaatgctgtgtttgatctataggataaggtggtgaccaccagatttctccaatgtaaaggtacattttttccctttgtaactagcaggtaatcagtgggatggttctttggcactgattgaatagcctgtccctaagtagtattttacccaatgattttagcaccttttaatgtgctttgcctatattgataattacattggggtagcaaaattgatgattttctaatcctacatttgtttgtttgtttgtttgtttgagacagagtctcgctctgtcacctaggctgaagtgcagtggcgtgatctcggcttactgtaacctccgccctgcaggttcaattcttgtgcctcaatcttctgagtagcaggtactataggtgcacgccaacatgcctggctaatttttgtatttttagtagagacagggtttcaccatgttgggcaggctggtctcgaactcctgagctcaagtgatctccccacctcggcctcccaaagtgctgggattgtaggcgtcagccaccacgcccagcctaattccacattccttttacaattattagctagcattcttctctaaagaagtattttcttccccttcccctttcttttttctttttattatcattgcattctcaaggatatgttttattcaattttttttgttcctcaaattgtgccaaaaatggtgagtggcagttcattcaagttggcttttaaaaatttttttcaatgtttgttttagatacagggggtacatatgcaggtttgttacatgggtatattgcaccaggtcatgagcatagtacccaatagatagtttttcaatccacatccccctccttagtgcacttagtagtccacagtatctgttgttcccttgtttatatccatgtgtgctcaatatttagctcccacttataagtgagaacgtgtggtatttgggtttttgttcctgcgttaattcccttaggactatggcctccagctccatccatattgctccaaagaacatggtttctttcttttttatgactgtgtagtactccatagtgtatatgtactacatcttctttatccaatctaccattgataggcacctacactgattccatgtctttgctattgcaaacagcatggcaataaacatacatatacatgtgtctttttggtataatgatctattttcctctgggtatatacccagcaatgggattgttgggttgaatggaagctttgttttaagtaattagagaaatctctaaactgctttccacagtggctgaactaatttacattcccagcaacagtatgtaagtgttccctattctccacagccttgccagcatctattgtattttgacttttttttttttttttgagacagagtcttgctctgtctctcaggctggagtgcagtgcacgatcttgactcactgaaacctcggcctgctggattcaaactgttctcatgcctcagcctcctgagtagctgggattacaggcgtggaccaccacacccagctaatttttgtatttttagtagagacagggtttcactatgttggtcaggctggtctcaaactcctgacctcaggtgattcacccgccttggcctcccacagtgctgggattacaggcgtgagccaccgcacctggtctgtattttgacttttttttttttttttttttttgagacagagtctcactctgtctcccaggctagaatgcagtggcatgatcttggctcactgcaacctctgcctcccaggttcaagtgattcttctgcctcagcctgactagtagctgggactacaggcgcccgccaccatgcctggctaattttttgtatttttagtagaggcgaggtttcattgtgttagccaggatggtcttgatctcctgacctcatgatccagccgcccaagcctcccaattcctagccacacctatgtggctgtagatcatgtaatctaataattattaaacaaatgtaaaattagtagagtcacagactttttttaaaaaaaggaaatatgaacacccataagaacatggaatgggggatggaggtgtcctaatctagtttgggggtgtaactagtgagctgagagagacctccctatggaagtgacctcagctgcaatctcaggcatggcgggagggggtgagtgctgcaaggggagggaacagcacgtgcaaaggtgctctatcaggaggtggccgggtacttcagaggacacaaagccagtgggggtgaaatgcagagctgtaaggagagctagatctcgcagggcctcgttggttacatcctcaagctaaaagccacagaatgccatggagggattttaagcaggcaaataaaatggactgagctctgcttgtcaatatctattttttttttttttttttctgagacagagtctcactctgttgcccaggctggagcacagtggtgtgatctcggctcactgcaagctctgcctccagagttccagcaattttcatgcctcagcctcctgactagctgggattacaggcgcacaccaccatgcccagctaatttttgtatttttattagagacggagttttgctatgttggccaggctggtctcaaactcctgacctcaactgatctgccagcctcggcctcccaaagtgctgggattacaggcgcaagccaccacccccagcctgcttgtcaatatctctctacctgtgttatagaaaatgggatctgggagcaggagtgtgagtgtgaacactggttaggaggccactgcagtaactcaatgagatggtggcagacaagatgatccagatggattcaaaggtattgaggaagtgaaatggaaaggacttggtgacgaattcagtgcggggggagatggagagaaaatgtcccattctgatgcataatatggtttggctgtgtccccacccaaatctcatcttgaattgtagctcccacaattcccatgtgtcatgggagggacccggtgggaggtaattaaatcatgggggtgggtctttcctgtgttgttcttgtgatagtgaataagtctcatgagatctgatggttttataaaggggagtttccctgcacaagttctctctttgtctgtcgccatgtaagaagtgcctttcgccttctgccatgattgtgaggcctccccaaccatgtggaactgtgagtccattaaacctctttttctttataaattacccagtcttgggtatgtctttatcagcaatgtgaaaatggactaattacaatgcacaaaaggaaaaaggaagggccacactgggacctctagcatgggcctgttgggcttgaggtgtcttttgaaatgcctgagtgagacagtgagtaaacagcttgatattctgatttggggatcaaagtgaggtttgggtgggaaatgtaggcctgggagtcattggcagttgacatcttgactttggctgctaaaatgttcaagaaacagagtttcttgggggcagggcattcacttgcatgggaaaaaaattacacctttattttctccaacctctaatgaaatctcagcatatttttcatctacgaatgcaggcaacaagccacagcagcattagcaggacctgtgatttttgtcaccattagaaatcacagatattttcacatctcattaaattggttgcagatgtctcaaaataccctttacacccatcgcttgttatttaatgtgctaataaagaagcatgtatattactcaatcacaactttctaaaaatattttgatgactatttcaataaaagtgggttcctttgaaagcccgtgtatctcattttatgtttttgaaaatattactctgagaaggggatctagggagttcaccatgcggccaaagaggtttgcggcacaaaaatgagataaaacaccaaggaagagatgagaagagagcccatcctcgaggaatcccaaggttcagagcctgggtggaggacgatgagaagtggagaatgagaaaccgcccctggagacaatgggaaaccaagaggagcaggtggctttgcagaagctcagaaggacagtgtgtccaggaggggctggtgaccaagcaaatggacagctgctgtgaggtcaagcacagtgaggacagaaagagacccgctgcgtgcagagacggggaagtcatttgctgaagagccatttctgtggaatgatgagcatggaagccagattggagtgggctgaggagtgagtaggaggtggggaaatggagtcagtcagtgtaaataattcttttgagaactttggctgtgaaggggaagaaataagtggagggggatgtgggataaggaagggctgttctgttcttttttgctgagagatctcagatcacaattaaatgcggatgggaaggctctggcacagagcaggggatccagatgggaaagggatgagacccaggctcacgggatcccaggcacaggtggagagggcggtgatggtgggagacagcggctggagtaacagtaagctcaggaaatttctagctgagggacactatggcgtgaggtggaagagaggagggcgtgaagattagggagaaggaagacggtttgaggaggaagacagcgttgaccaaagaagcggggcagcactgaggaattccagaggctgtggcctttcagcggcatcacttttgaaagttgagtgacttttctccagcagtggtcagtggcctggatatgaggcagaagatgatggatgggtgggatttcaccagacaggtgtaaaagaagacaaaaggacaagagaattattaagagggtcaagcacaggacctaggctgtgtagggaggacacgtcagtgtggagcggacaatcacagggcaaggaaagaggaatccacgggcgagaggttccccagaggtggaggaagtgtcactgggaaatggttaaacagcagagccggaaggtctggagacctgtgatgatccagcgattttggagatgaaattcttttgggcgatgacaccacctgggatgtgctattggggatgggggtggcagagtgggacggaggagggcacttgaggaactcgggatctgagatgccaggatgtggctggcttagcctggaggatgctggagtcaaggattgtggtggcagatcaggagatgtggtggggacagagactgaactgcctgccaaagtctgcactgccaggggactaacagtggcaggaatgacaagggggagaggatggtagaatgaaacagcacaagcctcggtggacagtgtttccaccagagcctggtgggcagtggtctggagcagcagtgggagtaggacagcctcaaggaaaagccagcttcactgcggcagggaggggagggagctctgagaaggggtctgaggtgcatttcctgcgctgcagggaggatgcactgctcaccgtttcccagacctgccacccctccttgactcagagtcttccttcctcctgtaacgtcctctctaccacagctccccagcctcacctccagattcccaaatcttgtcagtgacttaagatccagcttaaaaatctgcatcctcaaaggccgggcatggtggctcacgcctgtaatctcagcactttgggaggctgaggtgagtggatcacgaggtcaggagttcgagaccagcctggccaagatggtgaactcctgcctctactaaaaatacaaaaattagccgggtgtggtagcttgtgcctgtaatcccagctactcgggagcctgaggcaagagaatcacttgaacctcggaggcggaggttgcagtgagctgagatcttgccactgcactctagcctgggcaacagagcaagactcccatctccacaaaaaagaaaaaacaaaaacaaacaaaaaaactgcatcctctatgaagctttcccaggtctccccctggccttcctttttttttttcagatgaagtctcactctctcgcccaggctggagtgcagtggtgtgatctccactcactgcaacctctgcctctcgggttcaggcaattctcctgctttagcctcccgagtagctgggattataggcacccaccaccacgcccagcttatttttgtatttttagtagagacggggtttcaccatgttgcccaggctggccttgaactcccgacctcaggtgatcagcccacctgggcctcccaaagtgctgggattacaggcatgagcccggcccccatagtctttttattatgctcatcagacacagttttgaactacagacatttgtataatgccttagtttaccaacactgtcagccactcgggggggggcgtggcttattaattaccatccccatggtacccaacacggtgtcttgtacacaagtgactttagtttccttattttttatttttaaatttaaaaaattttattttatttttaattgacaaataataattgtattataatttctgaatgaataaagcaatataaaaacaaaataaaagagttttaggatgaaatgctatatgttataaaatatgtggaatgcaggtatgaacctgaataattttatctcacaatttaaaaattttaaaattttgatatctgaattttaacgtcttttcaattatttatttatttatttagagacaggatctcattctgtctcccaggctgaaatgcagtggtgtgatcatagctcactgcagccttgaacccctgggctcaagtgatcctcccacctcagccttccaagtagcgggaattacaggctaatttttaaatcttttgtaatgatgaggtgttgctgtgttgcccagactggtcttgaactcctgggctcaagtgatcttcccaacttagactcccaaagtgtgggattacaggcatgagtcactgcgctggcccttaaatggtttttaataagtactgtggttttaaaaactggaaacatttttcaaaatagagaatttaaagaaaatgtagtaaacaaacacatagcgctacttacaaaggaaaaaaagacattttattataatctcctctcacacaatgtctgcgctgctaagaccaatcaacacagggaaccctttgggtcagaggtcaccaatcctctgcaccaacaattcactgagctgggataacaattggtgcttctatcaacccggccacatggcaggatcaccctcgtgcaaggacgaggctgtcttgcctgtgcgttgaaaaaggcaggacaactttctggaagcatctgcaattcaaacggacggttctcccattttaatgtcatgccctattttaaaattacctagaggaactcagacgaagcacagaaatgaaggagaaattaagcgctgctggctttgcccaagatagctagtacttgtttgctgcattaatgctgctgaagatctccagcaccctggtctgcctacagaggggtttgcacaccagtattccaattactctataacctgatcataaaagaaatagccagttcagtctggtgagttatctggcggaatcttcaaccacaacaagatgacctcccttataatgtacaagtgagtcctgggtcaacttcaggccgttctgagtttcctccatctactcagagctacaaccctgccattcttatgcctttgcatccttgcctacctgtgaccaaaggaacctggtgttttaaagaagccatctgtccctctgtagagtggtatgccaggaaaagaatgctttatttagctggctggctactctggtcaccacttgttccggggtttcaagagggtctgatcataactgactaatcttctagcccaaatggccactgcagattggcagccttaccaaaccattctcccgtcaatcatttcaagccaggtcatggagcattctccactccaagtcacattatcccctttcttctcttgcccacagtaaggatccctattctggctattacggcgatatggttacaacttttgataggtgcacattcctaaaacattcttgcaatcaaggtaagaggtggagctcagacactggaccaaattgaggactagataaaacggggatgggctgcaagcagctttccataagacatgcccaacaatgtgccatgtcagtttaccattgccatggcaacacctgggagttaacactcctttacatggcaatgacctaacgacccagaagttaataccttttcctagaaatttctgcataatctgcatgctattaaaagtaggtatagcctgggcgaagtggctcatgcctgtaatcctagcactttgggaggccaaggtgggtggatcacctgagctcaggagtttgagaccaggcaacatggtgaaatcccatctctactaaaaatacaaaaaattagccaggtatggtggtgggtgcctgtaatcccagatactagggaggctgaggcacgagaatcacttgaacctgaatcgcttgcagtgaaccgagatcctgccactgcactccagcctgggttacaaagtgagactccatctcaaaaaaaaaaaaaagaaaaaaaaaaagaaaagtaggtataaatatgatttgagaatggccctgagctgccactctgggcacactgcctatggggtagtcctactccacaaggagcagtctgtctgctgctgctgtgcaccaccacttcaataaaaattgctgcctaacaccaccggcttccccttgaataccttcctgggcaaagccaacaaccctcctgggctaagtcccaaggctggggctcacctgccctgcatcacaactgtcagtcatcaaatatgcatggagctcctattatgtgctaggcattggaaatataaccacaaacagtgcctcctcttttgactagctcccagcctaagggaggaggcagacagaaagatgtaccccatggtgggcatgagcccagagggtgttctaagaatacaaagacaggacgagcaaaaccattcaacccccaggagaagctccagaaacttttttcagaggaggtgccctcagagttgagggtgcacagaggctgggcagatgagctcgggaggtaggcaggggtcaggcacacaagggccttgggtaccttgcgaaggtatctgaatttgatcccaaagacaatgggaaaccactgaagaatgtttaataaaggagtgttgtgatccaatttgatcctagaggtatctatctctcttatagcagcctggaagactgcctgtaaggggaaaagtaaagacaaaatcattagggaaatgacaataatccagacaaatccaagcactttgggaggctgaggcgggtggatcacttgaggtcaggagttcaagaccagcctggctaatatggtgaaactctgtctttactaaaaacacaaaattagccgggcatcatggcgcacgcctgtagtcccagctactcagaagggtgaggatcacgccactgcactccagcctgggtgagagaacacgactctgtctcaaaaaaaaaaaaaaaaaaaaatccagacaagaaaagagagggccctacaaaggcaggtaaaagtggacagatttgagggagaggagaggagacagtcaggtttcagtgtttgattgctggaagtaggaggaggagcagaagaaagagaaggcagagtctaagataatttccaggattctggcttgggcagaaataagaacttcaggaagaggaaacaatttgaggggagatgatgatgtattcagcaccatgagcctgaggggcttgtgggacctgccacggtgaacagagcaacggctaaaatggaaaacaaactcaaaggaaaattcccacagatctgcacttgtcaaaccgtgggctgcacattctctctccatgacgtgcgtttcaggctccagatgctgcgtgcagagctgcgttcttacccagtgcacctcgagggcgcagaatctgagctagagtcaagagggcggctgtgaagaacaccacgccaggtgttaagggtgactcacagcctcccagggtggggccccctggcagctagaaccagcgtgtgcatgcgcgacctgcctcatcagcacacaggcctagggccagaaagaagaggcccgacccacaaggaatctgagaatgggcaagcagaaattagagaaaattaaaagcatgattcatggaacacatatgccacatcctaagccgtggctgctttcatgacactgtaaagggtgtcagtgggttgacattgacagattaatgggaggatgtctccccaagagccgtttgaaagtggagaagctgaaggtttcacggacacgataggatgaatcaatagggaatgaaaggagtcatgcagatatacccaggtcatagaaaaacacaaaatgcaaatcgagccagcctccacggacagctgagtcacccgagagctaatatttgctaggagccgcagtatgcaaagcattgtgctatggattatgcagggctggattctgggaaacaaaacccttccctggctcatggggtcttgttttgtttttgagcttgactataatctggagctgtgctgtgccacagaactttctgcagtgacagaagtgtcctagatctgcatggtccaatatggcagccggatggctgagtgcagtggctcacacccgtaatcccagcactttgggaggccgaggcgggtggatcacctgaggtcagtagtttgaaaccagcctggccaacatggcaagaccctgtctctactaaaaatacaaaaactagctgggcgtggtggcgggtgccagtaatcccagctatgcgggaggctgaggcaggagaattgcttgaacctgggaggtggaggtggcagtgagctgagatctcaccgttgcactccagcctgggtgacagagcgagactcggtctaaaaaaaaaaacaaaccaaaaaacaaaaaataatatggcagccactgaccagacgtgctcttgagtgtgtaacatgtggctagtgccactagggatctacacagtacatttaattttaattaatttaaacttaaagtttaatggccacatgtgcctagtggccactgtattgaaaggcacagttttagacctttgctgctctcatgcatggctggacattctgactttttaagccattgcaggctacttgaaaagactttattttttatgttaatctctaaaattcgtgtggattcttatgaacaaaacaattacagtgtttacgttgggtaacagccttcctctggaggcgcaccttgcttgctggtacagtcaagtgacttcattgatgtgaacagcacactgggccaggcctggggcactgccagctgcttctcggtatcaggttcactgcctacgcctccttccgatgtaaccttgagtcctggtgacctggaatctaaatatttagcactcggttgccaccagtgaaaggactagaatcttatttttattagcagagcaaatggtgcacttaaaaaactgacagtgatctctacctttcttccccatgaagtaaatgcagtgagaacgtgttctcagtccttgaggcttgtgcatttggaacgacgtcctttccagtgaggatacaggatcttggaaagatgagaagggcccgtgatgtgttgctttctagaagcttgcggcttaccatgtcctgcgccaattaatcattttcatcatcttctatggggaaatcggggctcctgtcccctctctgtgaaggttcgtggggacaaaattccttccgtgcctctgtcaatcacagcaagctcctctgggccagcagcggtctcgccggtgcctgggaaggaggggcgttgctttctccgtatatccagaagcctctttgctttttagtctactaaattacccactttctagtgggttatgcagagccactatttatttccctgttaaattccaatctgatgaaacagttcacagggttgtacgtaactctgaaaaggctctaaaattaagttgccatattaggttggcttttaaaaatgtggcctgggactgggctgagggattctagaagcctcagaaccttctcctccaccaatacctgttggagcatcacttgcaagtatatttggacaccaaggcagtttataatgtactgtaatgtcagtgtgccacttagaagtctccttcgttttcacaatgatcccacgagatatgcataataagtatctccttgatgggaaactgaagtgcttgcaagtggtttgcctgaattcacattgtaatgagaggcagagctggcctttcataaatgctttctactatgccaagccacgactgtaaatgtatttaggaagtaccactctaaagaacttctcagcgcaggcttgataggtattgcttcatcttggacttagatgaaatccaactgctgcataaccagcagttagagccactggttgtggtgaggaggttatgccaggatgaagcagccagcaggttaactgtgtgtttggggatctgcccacctcaaggcagttgtctggaaggataccttgacactgaagccattatttgatggtaaatgcctcgttcgttccaggctcatcagaattgtgacaattggagtctgggttaaggaatgaacaagtgatgaaaactgcaatataagtgtcaaaatttggtagtggtaagaagcacatagtgactgaatggtggaaaaatttccatggattaagcaattcactttcataacagccactcaatcagagaaggaacctgcctttacaaatcagaggcaaatgctatttcgagttttcaggtgctgcaatctctaggaggaaatgacttgggatatttccacctagggaggaaggctttgtttgagtttacatcatctcactgagctatatatcattctcctgcccctttctgattgacggagaatcttttgcaactctagtgcctgatgcaacattcaatacactgagctgtggacattggatctgtctgaccttggttctcttttgagacatgccagccttcttattcacagcttcccttgagagactagctccaggacctccctggagttgtggaccctgtgggaagaggctgaataagttctgcatcccctcaggatgggcagcctatactctgaaggtttgcaaacaactgttcttttttttttttttttttttgagatggagtctcgctctgtcgcccagggtggagtacagtggcacgatctcagcttactgcaatctccgcctcccaggttcaagcaattcatctgcctcagcctcccaagtagctgggactacaggcgcatgccaccacgcccagttaattttcgtatttttagtagagatggggtttcaccatattggccaggctggtcttgaattcctgaccttgtgatcgccggccttggactcccaaagtgctgggattacaggtgtgagctaccgcgcctggccaaacgactgtattttaataaaaattgggctaggggttcaaatctgggaggggaatctccaaaccaatccatgattttgggggttgaagatttcttggatctggcttgagtttcataagagatctctggcttcatttatatcaagcaaaacccaaaggattgagccaggcaggatggacgttatgagagcacaagttgaatggctgttaagaatgatgcattcagtgacacttcctctcaccctgcccttcctctgcttttgtgtccaggggcaaatcctccagtatcccccaaagaatatctctaatgcagagagcaaagcagaggtgaatttcactgtggaaaattttgattgtgtcacttttctcagtagagaagatgaggccttgatgacacttgtgcaatcagggctcaaacacttgggagatcattatctggagaaaactgagattatgtaagcaatgtttcttattctctgacacactgagggacagtgtcatagtgcaaacataaaatatcctgtcctcatattttagaggaaaaattgccagttttttttttttttttttttttttttgcattttactatgtttttcttaaaaaaatgttgtattggctgctcctgaatgactactgggtaaataacaaaatgaaggcagaaataaaggtgctctttgaaaccaatgagaacaaagacacaccgtaccagaatctctgggacacattaaagcagtgtgtagagggaaatttatagcactaaatgcccacaagagaaagcaggaaagatctaaaatcgacaccctaacatcacaattaaaagaactagaaaagcaagagcaaacaaattcaaaagctagcagaaggcaagaaataactaagatgagagcagaactgaaggagacagacatacaaaaaacccttcaaaaaatcaatgaatcctggagctgtttttttgaaaagatcaacaaaattgatagactgctaacaagactaataaagaggaagagagaagaatcaaatagacgcaataaaaaatgataaaggggatatcaccaccgatcccacagaaatacaaactaccatcagagaatactataaacacctctatgcaaataaactagaaaatctagaagaaatggataaactcctggacacatacaccctcccaagattaaaccaggaataagttgaatctctgaatagaccaataacaggctctgaaattgaggcaataattaatagcctaccaaccaaaaaaagtccaggaccagatggattcacagccgaattctaccagaggtacaaagaggagctggtaccattccttctgaatctattccaatcaatagaaaaagagggaatcctccctaactcattttatgaggccaacatcatcctgataccaaagcctggcagagacacaacaaaaaaagagaattttagaccagtatccctgatgaacatcgatgcgaaaatcctcaataaaatactggcaaagcgaatccagtagcacatcaaaaagcttatccaccatgatcaagtccgcttcatccctgggatgcaaggctggttcaacatagcaaatcaataaatgtaatccatcacataaacagaaccaatgacaaaaaccacatgattatctcaatagatgcagaaaaggcctttgacaaaattcaacaacccctcatgctaaaaactctcagtaaactaggtattgatggaacatatctcaaaataataagagctatttatgacaaacccacagccaacatcatactgaatgggcaaaaactggaagcattccctttgaaaactggcacaagacagggatgccctctctcaccactcttattgaacatagtgttggaagttctggccagggcaatcaggcaagagaaagaaataaagggtattcaattaggaaaagaggaagtcaaactgtccctgtttgcagatgacatgattgtatatttagaaaaccccattgtctcagcccaaaatctccttgagctgataagcaacttcagcaaagtctcaggatacaaaatcaatgtgcaaaaatcacaagcattcctatgcaccaataacagacaaacagacagccaaatcatgagtgaactctcattcacaattgctacaaagagaataaaatacctaggaatccaacttacaagggatgtgaaggacctcttcaaggagaactacaaaccactgttcaacgaaataaaagaggacaaaaacaaatggaagaacattccatgctcatggataggaagaatcaatatcatgaaaattggccatattgcccaaggtaatttatagattcaatgccatccccatcaagctaccagtgattttcttcacagaattggaaaaactcctttaaagttcatatggaaccaaaaaaagaaccctcattgccaagacaatcctaagcaaaaagaacaaagctggaggcatcatgctacctgacttcaaactataccacaaggctacggtaaccaaaacagcatggtactggtaccaaaacagatatatagaccaatggaacagaaaagaggcctcagaaataacaccacacatctacaaccatctgatctttgacaaacctgacaaaaataagaaatggggaaataattccctatttaataaatggtgctggggaaactggctagccatatgtagaaagctgaaactgaatcccttccttacaccttatataaaaattaactcaagatggattaaagactaaaatgttagacctaaaaccataaaaatcctagaagaaaatctaggcaataccatttaggacataggcatgggcaaggacttcatgtctaaaacaccaaaagcaatggcaacaaaagccaaaatagacaaatgggatctaattaaactaaagaacttctgcacagcaaaagaaactaccattagagtgaacaggcaacctacagaatgggagaaaatttttgcaatctacccatctgacaaagggctaatatccagaatctacaaagaacttaaacaaatctaccagaaaaaaacaaacaaccccatcaaaaagtgggcaaaggatatgaacagacacttttcaaaagaagacatctatgcagccaacagacacatgaaaaaatgctcatcatcactggtcatcagagaaatgcaaatcaaaaccacaataagataccatctcacaccagttagaatggcaatcattaaaatgtcaggaaacaacagatgctagagaggaagtggagaaataggaacacttttacactgttggtgagagtgtaaattagttcaaccattgttgaactgaagatagtgtggcaattcctcaaggatctagaactagaaataccatttgacccagtgatcccgttactgggtatatacccaaaggattataaatcatgctactataaagacacatacacacttatgtttattgtggcactattcacaatagcaaagacttggaaccaacccaaatgtccatcaatgatagactggattaagaaaatgtggcacatatataccatggaatactatgcagccataaaaaaggatgagttcatgtcctttgcagggacatggatgaagctggaaaccatcattctgagcaaactatcacaaggacagaaaaccaaacaccacatgttctcactcataggtgggaattgaacaatgagaacacatggacacagggtggggaatatcacacactggggcatgtcatggggtggggggctgggggagggatagcattaggataaatacctaatgtagatgaggagttaatgggtgcagcaaaccaacgtggcacaagtatatctatgtaacaaacctgcacgttgtgcacatgtaccctagtacttaaagtataattttaaaaaatgttgtgttgagtggggtgaataataaaattattgggaaataagagccatataaactgtattatagaagctatttcacataattactattatgtatacaaccatgacctttttcagaagtggtctgagtgttttgcagtgatggtttaaagaatgcataatttgtatagcaggaagaagaaaactataggaatctgacaccagcttgttccataagcttaagtgtgaaaaggaacataaaacttcaaatcctgcatatcccaaatgcatgagtattgcacataaaatggccgtgactgtgcacgtgagcctctgcatgaaagttccctgcagaggcacccagatgcccacttgtttagcaattccaatctgggaagactgctacatgctactgtttgacttgaattatattttcttatctgtccttgatcttatttctgagtgtaaaaatgtgagaatttatcttaatgctaaaaatatgttgttctagtcaaactagatttaatttttggataaatctcactccttaagtttaatcagcagcaggcattatatttagtcttagactaacaggaaaagatccaggcaacgtgttcttggtgctgccaatattgtgagatagtctctttcaccttcagactctaagtgaaatattttattgtacgattttatattccttaatagagagcatatctctctcctaggtatacatctacatctataaacatcaatcactgatgtttttaaggtgtcctttgaacattaaataaccacagtgtgaacatcctagattaaaaaagaaatctcaacaagaacttgattgatatcacgtattcaggatctatctcaggatccatgccattgataggaaagaaggagtctctcctctagagtatatttcaggcataaaatattaaataggaattcataaaaggcatattactcatcttaaatcaattcaccatgctaacagtcagtgttgaatacagcttgtggtattgagctcttacatagggtaagttaaattattagataagatcttaaacatgaaatatgatcatagagcttagcaattcagagcaccttctctggggtcagactgcctagaatggaatctctaccacgcactggctgtgaaatcttaggtaaagttttgtgacttctctaaggtccagttttctcatcagtaaagtggggcaaagatggatggatagatagatagatagatagatagataaggataggtgatagatatatacatttatgagaattaaataagctaatatgtataaagtgcttcgtatagtgcctggaatgttgcaagcactgaaataatggtaactgcttaattattattatcatgatactattattaatcatattatcatattgttattatcacattgttatatcattctaagcaaaaatattttatcatcatattgctatatctaggcaaaaatatttaaacaattgccaattattacatgatacagttattaccacattttactctcttccttcatcagaaataaaaactaggcccaaccttgcatcaagttagaccatatgccacagagatgatgctgtgcttaagaaggcccagtgcctccaactcttatagagttgcagcatttctcatctggatggtgtcccatagaccatctgtgtcaggacctttatctacaggaaagaagagtgagcccaaccatagtgaggtgtgaagactgcagagctgggagccacaggggtggtgtccccaggaagggagttcccagccctaggctccttcctgcccctggctctccctgccttgacctttgggaatctgcaacatctcctttttgagttggctttttcctacatcacacacacacacacaccaccaccaccagcagcagcagcagccccaggagactgtctcccagaattcttcatacctgtttggaagatgacctgctagaaaaccgggatctctcaaaacttgtctcttgcccccaaaactgatcgcgtttcttctcatttgggtctcttctatattcctgtcgtctcagacaagcctgaagaacaacaacaataaaatgtttgtcttaggaccatggcaagcttgggtaactttatgcttaactccaatggtgaggagcatgaaataaatgatatgcatctccaggtgttcatcaaatacctctcaccaagtataaagaccaggtatcactcttccctttgcttaaaacgcaggtcaggccgggcgcggtggctcacgcctgtaatcccagcactttgggaggccgaggcgggtggatcatgaggtcaggagatcaagaccatcctggctaacaaggtgaaaccccgtctctactaaaaatacaaaaaattagccgggcgcggtggcgggcgcctgtagtcccagctactcgggaggctgaggcaggagaatggcgtgaacccgggaagcggagcttgcagtgagccgagattgcgccactgcagtccgcagtccggcctgggcgacagagcgagactccgtctcaaaaaaaaaaaaaaaaaaaaaaaaacgcaggtcagacgtaatagccattactttaataaattcaaacaataaacatactgagaggcattttgtcaagaatgtacccaactgttgccttctcaaggagggcagcacctgttacaccttgtgaatttctctttctggtcattctcttcatggcccctccctcttcctaccttcactatactgtgaccctggagatgacaccctagttgcgggatgagaattgtcaacatcagagcatgtgtgtttcctgcacttggaatctcctctgttagaagctctcttggcaaaaccgactgatctactaaaaagcctgctgctgtggccttgcctctctttagtttcctctgccctctcttctccaggccgaattaattgtcagagttgcaatgtatattaatttaagcttgaattatacatatttttttcctattgtaggtagttgtttgtggttttgagcctgtttctcctgctgatcattgagaaccctgagagtaaggacaacttcttatctttgaatcccccagcatccagcatttaattttagctgaattgcagctggccaggtgcccagaggctcatgcctgtaatcccagcactttgggaggctgaggcaggttgatcacttgatgccaagagttcgagaccaacctggccaacatagtgaaaccctgtttctactaaaaatataaaaattagttgtggtggcacatgcctgtaatcccagctactcaggaggctgaggcatgagaattgcttgaacctgggaggcagaggttgcagtgagccaagatagtgccactgcattccagcctgggtgacagagcaagagtctgtctcaaaaaattaataataataattttagttgaattgcatttttgctttggaggaaaatatcaatccctaagtgcaaaataagaaaaataaaattaccaatgaaaataattccccatgtttcttaacaaaattaaaataaaatctggtaccaaaatatttctcctgtagtactaggactgaacaaacctgaggatatcatgtactatggaaatttcaactgattttaagtacctcaaaatagtaaaagttttttttttccccccaagatggagtctcgctctgtcacccaggctgcagtgcagtggcacgatcttggctcactgcaacctccaccgccctggttcaagcgattctcctgccttagcctcccaagtagctggggttacaggagtgtgccaccacgcccagccaatttttgtatttttagtagagacagggttttgccatgttggccaggctggtcttgaactcctgacctcaggtgatcggcctgcctcagcctcccaaagtgctgagattacaggcatgagccgccacacccagcccagtaaaacttttttggaatgtttctatacttgcagatccagtagcccaattcaactttgccttgccagggccaaattatccactgtcatagaaaatgaatttgaagtaaagaccaacaatattgtttgtaaactaggcctgacaactgcccttcctggctgggttgagaaaggaaagattccttcagcacgtttcacgccctctgttagaaaaagcatctccttccgtgatgcagtaggacttaccagaatttcacgccatgagtaagcctgacattatgctgtaaggttaagaatagaaatgacccgatactaacaaaacatttactccttggaattgggacagttattcacatcgtgctttatgtctgaattgcaggtgacactctagcctccgggctcatcacagcagccaagtggtcacctgcaggaagtggaatcctagattctggggagagagatgcagcttcactccaacttgcttgggaagggacaacatctgtcccacagttaatcttcttttcaaaaactatgccacatagatagtaagtcatcataataaacactggactctgtttgttttaataatttaagcaagaaaaaccaaagaacactaggcagtaaccataataagttaaacaaaacaaacaaaaaacacccaatcatagagaaacccaggtaatcctaaagggagtcggctggaaagtgtaacgaagttcagctaaacgtgtgcctttgttgttccaatccttttacaaggacttcaaatgggagcttgtgtttggaaagagcactggcgtggagtgttgtttccgaaaggggcagatgtctgtgccgtcctaacctactggtattaaaggcaaaagaagaaaatgctgatgggctgaaagtggaggaggcagtgttagcaaatgcaccaggaccaaggcagattttgtgggatgaacagaattcttgtgggctgagtgttttttgaaaattctctccaagaatgcatacgacttaaatatttctttaccaaaaggggaggaagaatagattggtttgcaaagttgaaaaaaattttttccctctagttccttgttcctctttttacagaggagcagaacaaaccagtggcaaggcaggtacttaaacttttatcttgacagagccaagcaatctttctacgtaaatcaaacatgaatcctctcaaagttatagctttgctgagaaggaacacaggggcagagcaaatatccagactcacagtcgtagaagcagcaagaacctttgccttattccctgcaagggctggttttctttgtatttgtaattgtaaatgattttctgtcagctgttgatgttgtttttgtgcggggcgggtggggggagcctaaggtgactgggcaggggaggacagaatccatgggtcaggagaggaatgtatttgtaattcataaccaatagcggcttcccttaccctagactttaagaacattctcccctttcaattgcacgtgtcaggattcggatggctataaataagtctctgatcatgtggcaaaactggccgagggcagtcttgaaattgaaggcttcaggtaactttttatttcttccttctgggaagatcagggcttcttccttccctcctccattggtgttgaccccccacccccctagtgcgtccccctgactacagcatacgtagtcgggctgccttttgtacagaaggtaccactgtgggggcaaaatgcagaatgtgcatcaatgtctgtggggatgacgtgggttttgtgactcattgtaactcaatcctggtaaacacgacaatccccagctctgccactttctaacatagtgaccttgggcgagctgactaatgccattgattcttgctttcctcatctgtaagaggaagttgcagattgttgatatgttaacatcaacaaggcatacagttggtgatatgttaataatggctggcccttggggagtgttcaatcaagggtgcctactaacaccatcaccatcaccaccaccaccatgactaccatttccatcaccatctccatcaccaccaccacctgcaccaccaccaccacctccatcaccaccacaaccatcaccacccaccaccaccacctccatcaaccaccaacgcctccatcaccaccaccacaaccatcaccaacacaaccatcaaccaccaccaccaccacctccatcaccaccatcacctccatcactacaaccatcaccaccaccaccaccatcaccaccaccacctccatcaccaccaccacctccatcactaccaccaccacctccatcaccaccaccacctccatcaccaccaccaccacctccactgccaccaccacctccaccaccaccacaaccatcaccacccatcaccatcccctccatcaaccaccaccacctccatcaccaccaccacaaccattaccaccaccaccatcatctccctcaccactgctgcctccatcaaccaccaccacctccatcactaccaccacctccatcaccaccaccacaaccatcaccaccacctccatcaactaccaccaacgcctccatcactaccaacacctccatcaccaccaccacctccattaccaccaccaccatcacctccatcactatcaccacaaccatcaccaccatcaccaccaccatcaccaccaccacctccatcactaccaccaccacctccatcaccaccaccaccaccaccacctccactgccaccaccacctccaccaccaccacaactatcaccacccaccaccaccacaaccatcaccacccaccaccaccacctccatcaccaccaccacctccaccaccaccacaaacaccatcaaccaccaccatcacacctccatcaaccaccaccacctccattaccaccacgacctccatcaccaccaccatcacctccatcactaccaccacaaccatcaccaccatcaccaccaccatcaccaccaccatcaccaccacctccatcaccaccaccacctccatcaccaccaccaccacctccatcaccaccaccaccacctccactgccaccaccacctccaccaccaccacaaccatcaccacccaccaccacctctatcaccaccaccacctccaccaccacaaccccatcaaccaccaccatcacacctccatcaaccaccaccacctccatcaccaccaccacaaccattaccaccaccaccatcatctccatcaccaccaccgcctccatcaaccaccaccacctccatcaccaccaccacctccatcagcaccacaaccattaccaccacctccatcgaccaccaccaacacctccatcaccaccaacacctccatcaccaccactaccacgtccatcaaccaccaccaccaccacatccatcaaccaccacctccatcatcaccaccaccaccacctctatcaaccacaaccaccactacatccatcaaccaccaccaccacttccatcaccaccaccaccacctccatcatgaccaccatcaccaccatcactaccatttccatcacatctccataaccaccatcaccacctccatcaccaccaccaccacaaccatcgccaccacccccatcaaccaccaccaccacctccatcaccaccaccaaaacagtcaccaccaccacctccatcaccaccaccaccacaaacaccatcacaaccatcaccaccaccaccactaccacctccaccaccaccacatcaccaccaaaccccaccacccatctcacctccccaccattaccactgctgcctccaccaccactgccactcccatcaccaccagcagctgtcacagccttttaactgctgttctcaatcccatttcctggtttacttctatatttctaaagtcagcctttgccaaagcatatgactctgatgttggttgcagaagaagagagaatctttctgtctagtcctgaggttcatccttgtttttctgccctgtaagtagaggtctgtttcctataccccagccagccaactgagcagctcctgctctcagtcattcagggtcacaatgaagccgcttctcttcgacattacagctctctgagtccatagttgtgctcaaagttccttttgtttctttcattatcaatctgatccctccagtcatcatgtgacttcagaagccatgtgccccaggaacacttcccagcctcataattctggtataaagccatcagaaccacgacccgactttacatctccagccagaatggcatctgttcctctatctcaggatgcactttgagaagtgggagttgccacttccttcagttggtttctttttgttgttgttcttgcgatctgacttgcataccccagagtctggcattttaattgtcctcggtgacattattaaagttcattaattttaagaggtcaagaaatcaaaggcataaaaacagtttgagatagtattcccctccagctagttttttttcctgttttggctgtgaagagtagagcaacacatacctcaaaggtgagccaggaggagaatccctcacctccgtccctatgggaagaaaagttgatttatccccattccagctccctgagtggacaactccaaacccttgccacccgctataaagtcgcctatcgtgtccttgaacacatgtatattgagatatttagttgatttgcactttaaagaatcaagatgaataagtgacatgaaatgaaaccagtttgaacacatttaatagagtatagaaaatcactctgaaatgccaagtgtaatctttgccttcagctttccagtggacattaatggctaaattctgcctccagttacataaatcatttgatcaaaaaaaaaaaaaaaaaaaaaaaaaaaagaagctaggcagcatgaaaatccttgaagcaataaagccaaattctgagatggcatataattatatactagttaccagattctgaaatagcatgcaatatgccaaatagatgtttatttcctcttgttttctcaaaagggtcccacccaaccactgaaaggagtagtatcaaaataactcagggcgaggttagccctcctctcttgctgctagcacagagacctgcaaagacactgagaatttgctgcataccaacacttagcgtattttaggctgtagcaggaatggtttacacaagaggtttctaaagccttcaactggagccagttcattaaaggtgagtggagtacaggaagggacacacaccaaatgcagatgatttgggattcgtgtctagttattaggtcttagcctgtttgtatgccctgaaatggggaatccctggtcacactggacctggagtgaaagctgggatttccataggaagtcactggccaaactcattgatgatccagagtgccaatatccacccaccacaaagtcaccatagccaattatctaaatacacatgggctgtctatgagctgagttactgaggggtcactaacgtcatgcaattgatccttttttttttttttgagacagagtcttactctgtcgctgaggctggagtgcagtggcgtcatctcggctcaccgcaacctccgcctcctgagttcaagctattctcctgcctcagtctcccgagtagctggattacaggtgtgcaccaccacacccgtctagtttttgtatttttagtagagacatttagccaggctgatctcaaactcctggcctcaaatgatccacccgcctctgcctccccaagtgctgggattacaggcatgagccactgcgcccggcctacatcatgcaattgattcttaaaccactactttaaattctttctggaaccaggcaagggatagattaataatataacaaaaaaaatttgctgctccctgcaaagcagttactgtgggttgccatttacttacttcaatgatatttagaacatcttaaagacaaccagatttattttttgcagaccttgtggtaagtggttttgaaaatgctcaatgagagtggatttgacttttaggaatagtcacaagtcagctggctctaagtctgacaagcttagttgatagccaagttaggcaacacaggctttcatgaatgtcaaggcaattggttcaacattgaagagggagactcagcccctgcccttaagaagtcgtggtccaggttgagaggatgtcacacaaaagacaatgtgcagccgggtgcggtggctcacgcctgtaatcccagcactttgagaggccaaggtgggtggatcacttgagcccaggagttcgataccagcctggccaacatggtgagacccccgtgtctctataaaaatacaaaaaatgtagctgggtgtggtagcacatgcttgtggttccagccactcaggaggctgaggtgggaggataacttgaggctgagaggttgaggctgcagtcagttgtgactgcaccactgcaccccgacctgggcaaccactgcacccccacctggacaacagagcaagaccatgtctcaaaaaaaagagggagaaaaaaagacaatttgcaatgcagtttcataagctctgtgcaggaagcatgaaaagagtgctgcagtactagagtggtggaaatattctaaagttatgatagttatggctgcaaacttggtaaatttactaaaagtctttaaactgtacacttaaaacaggttgaattttatgatatataattttttttttgagaccgagtttcactcttgttgcccaggctggagtagagtggcactatcttggctcactgcaacctccgcctcccgggttcaagcgattctcctgcctcagcctcctgagtagctgggattacaggtgcctgacaccacgcccagctaattttttgtatttttagtagagacggggtttcacgatgttggccaggctggttttgaactcctgaccttgtgatctgcctgccttggcctcccaaagtgctgggattacaggcgtgagccaccacacctgaccagtaaagttgtttttaaaaacagctactatgtgtatgagcacagagattccctttagttctaaattaaaactatgatcctcaccacctttgcccaggggagcaaggtgaagaagggggaagaagacgttggcaaagtggtgaagtgtaggttggttttgcttaggttttgagtcttgggcctgcctttaagtgagggaaagcacagaggagtatcctatattccaatggtatcgccacatttacattttagataggtttcaaggaaacagtctgacagatggcaggactggatgctaggaggccagttataaggatattataatggtcttggacagaaattagggaagttggaaccatggggtggcaacagggtaaaaaggaaggcacaagtgcgtgagttcttaggtatacttggcaggacttggtaactggtgggatggggatgaggagggagaggaagagacagggaaggcttagaccataggaggggcagcagggagatggacatggggatacaaccatggacatatttgatttcagctgcctgtgtgacatccaggtagacatagccaactgggaaatacacatatgactctgatgctctggggagacccaggattacaagtcttagtataaagtggtggttgaaccatagcagaggatgagatgagtcacagtgaccttgtgaactagaaaaaaattgggctgagatggaaccctagggaaattaacatttgagagccagggagatgaagagtacatagaaaagaaaatggagaaaaatgtgagagaaacaggaagaaaatcaagagagtgtgatgtcagagagccaaaggaggctggatatggaggctcatgcctataatcccagcactttgggaggctgagacaggaggatgacctgaggccaggagttcgagaccagcctgggaaacattaaaaaaaaaaaaaaaaaagaaagccaaagagtcatgtttgagaagaaaggagtaataacgtcaaaggtagttaagactgcagaaaataaagactgggaaggagcccggtgaatttggttactgacgttagcagaagaatttcaggagaggagagcggaggtgatggtcgggctgaagcaggccagggaatccatgggagggcaggaagcagagacagaaatggagctggctgtttggggacatctgggatgaggcaggaagaagccagcgctgcagctagagaaggacacgatgtctacagaaagctttgctcttttgttcttaagatgggagagacttaagcacgttcgtggactgagccaacaagaaaggaaatgtcaaagctaccaatgagaggcctgtggatggcaggggctggagagcagagggcctcaaatcaggatctcaggctgggtaccagcaggaagagggtcacttcatcctccaagatgtggggactagatggtgtgtagcctggagcgaatgggaggaggctgagtgggttctcacctgccggccttggggtcttcattttgttttgtgtgagtgtgtgaaacccggcagggagttctttgttgaaactatggaggttggaggtttgaaaagagtgaaaaggtttaaaatcgtgatgataacagagggagctgatggacaagtaaatgtgttgacgtgagtcatccttcattcttttctttccctcactccgcctctccatctatcagcaagatgtctgttctgcttctatttcctgggccgggccacttctcaccacctccactcctaccaccccgggccaagtcaccagaatctctctcctgaatttctatcatagtttccttacaagttttcccgcttcttctcttgccccttctagtcctttccatataccgcagccagagtgacccttaatacaacataaatcagatcatactattcccccacttaaaccatccaataattctcacagtgataagaataaaattgggccagacacagtggcttatgcatgtgatcccagcactttgggaggccgaggcgggcagatcacctgaggtcgggagtttgagaccagcctgaccaacatggagaaaccccgtctctactaaaaatacaaaattagccaggtgtgttggcgcatgcctgaatcccagctacttgggacgcggaggcaggagaatcgcttgaacccaggaggcagaggttgcgatgagccaagatcgtgccactgcactccagcctgggcaacaagagcacaactctgtctcaaaaaaaaaaaaaaaagaataaaacctaaatgccaagctatgttctgtgagacccagtgtgacacttccgtactttccctgggttcatgtgttccagcccctctggctaactttggtttcatccgggctggttcctgcctcagggcctttgcactgtctctttccttccgattgggaagctctggggggatctttcccataattcacctcaacagtcaagtgtcacttcctcaaagagacctcccctgcttctaagggatcaccgcctccaaccccttaacctgttttattttcctcattgtatttatcaataactgaaactaccttacacatttctacttgtgtaagtccttccccctcttaatcttagaataagaattccaggagaacagaggctttgttcagcacatagtaggcaccaaatagatattggctgaatgaatgaatgaaaaggcagtgttaagagcccaatggagattagaaaataaaacggcaacggctcaaagccacacagttgtgtgattttcttcaacaaggaccataaaactataagattgattttttcctacatgcctgttctggagacaatttcaaacaggagccgggtggcagaggcatctttgtgaaaagcagttagactcccagggcgaccagtgtggatgtttatgttcttatttattttgcagaaatgccctcgattttctcgtcttcttatacgtgggttggcacgttgtgggaggaaattgctgactctgtttccagccctaaagctaagccgtattatacaggtgaaatcaggttactgagacaggtctggtttccttggtgacctgggagctttagttatatttgaaattgctaagaaggggaaaaacctgataacagcagttctgtgttttcctcagggaaggagcgcttttcaatcctcagcccaggctgaggacgtgccttcctgattggcaagggctgaggtcccacctctggtgggatgactgacactttttacctgctcccaggatcccacaacctagtctggcaagtttgtcctatgccagctccgggtgactgcaacctcaggattcctcaggctccctgtgtgttttggttttgcacgtaaacactgtaactagggggaccagcagttagctcattgtaaaatgtgcaaaccacctttcttctggtggggatgacaacgaagggcgtgttattttacaaatggtagggcgacccagttaactctttcatgttttctttccttctcagttggtttgtcaaatttaagccctaatgccactggtggacaagggctccatgccgaaaactgagggaagtacttttacagtgtttatttcatttcattttcatgataatactagaagtggatacaaccattatcctcgtttttttgtttttgtttgtttgtttttgagacggaggagtctcgctgtgttgcccaggctaaagtgcagtggcgcgatctcggcttactgcaacctctgcctcccgggttcaagcgattctcctgcctcagcctcccgagtagctgggactacagtgccaccacgcctggctaattttttgtattttttgtagagacagggtttcactgtgttagccaggatggtctcgatctcctgacctcatgatccgcccgcctcggcctcccaaagtgctgggattacaggcatgagccaccgtgcccagctatccccgtttttttttttttttttacagacgaggatacagagaggtgaagtggcttttgctagttacatacctaatcggtgggtttggattttagaaaacttttactgcttatcatacgttgatgctgtattctgaattctctctaaatactgcaagagaaggcagaagaccattcttgctttctgcaattacctgatactcagagtccaccttatgctgcatgtcccgcagatactgaacatcgctgaagaacttctgcctgtcccttgcgtcatgcaacatgattcctaatccctgacctgcacagaaaagataaacaaatgtgctgtgttagagtcctttgtcgtgatgccgtatttggatttattttcatctaattgcttttatttgtgtattcatctaatttcccttgtttgaaaggcacagatgctcctttcaagctgaagggacttcttgtgttgctgttgatgcccttacagtcctcctgttccaggcataaataatgcagccaccttcatcaagcacttcagtgatcctgtcctggttactcagagggagttagattgacagacacctgattcggttctagagcatgacaaaaaggaaaacctgagagcctagctaaataagcagtgaccaaagttacaggcccctggttacttaaattcatttatgcaacaatgattgcaccgttatttccatccagggactgtgctggacactggagtatagcaagcagcaaagcagacacgaccctcatctttgctctttttttcttttttctgagacggagttttgcatttgttgctcaggctggagtgcaatggccagtctcagctcactgcaacctccgcctcccgggttcaagcgattctcttgcctcagcctccctagtagctgggattacaggcacctgccaccacgcctggctaatttttgtatttttagtagagacagggtttcatcgtgttggccgggctggtctcgagttcctgacctcaggtgattcactcgcctcagcctcccgaagtgctgggattataggtgtgagccaccgcacctggcctgtgttgcttataatccagggtgcgagactgactttgagcaagtgaatcctaactatgataggccctctgaagcagaactatgcggctctttgagagcgttattatgggagggcataacctggtctggaggggtcaggcaaggttttccttaggcaatgacactgggtttgacagagtgagctagctgagaagtgggacagagaggacagcaggtgcagaggcttcaggcatgaaggagcaggtgcagatgaggcagacgggagggaagcagtgcagctggagcagagatgaggaaggaacagccccggaagggctgcaggggaggcaggggccagctcccatggggcctcaaaggtcatgattcaaagagtcatgggaaactcctgaaagcttccagtctgggaagtaaatgattagattcgtgtttttatttatttgttaattctttttcttagagacaagatcttgctccgccatccaggctggagtgtagtggtgtgatcataactcactgggtatagtggctcacgcctcccgaggtgaatcacttgagcccaggagtttgagatcagccttggcaatatagcaagaccatttctatttaaaagaaaattgaaaattagccaggtattgtgatgcatgcctatagtcctacctactcagaggctgaggtgggaggatcgcttcagcccaggagttagaggctggaatgagccatggtcatgccactgcactctaacctgggcaacagagcaagaccctgtctgtatttaaaaaaaaaaaaattgtattttaaaaagatccctccagttgcagtatgagaatggatggggtgggggtgatggtggtagagtaaaacaaagaagtgggaagaccattgggaatatttcatagtaatctagatgtgataagatggcaaccagcatcgggtagcaacagtggagagaaaaaggaggaggaggtggaggacagtggggagggagaggggatcatagctactcttttttatttttttttgagatggagtcctgctctgtcgcccaggctggagtgccgtggggctatctcggctcaccacaacctccgcctcccaggttccagctattctcctgcttcagcctcccaagtagctgggattacaggcacgtgccaccacacccggctaattttttattagtagaggcgaggtttcaccatatcggccagactgatcttgagctcctgacgtcaggtgatctgcccaccttggcctcccaaagtgctgggattacaggcataagctactgcgcccggcccatagttactctttaccgaccctctggaagggataggccttgttctaagcagttacatcaattaactcattcaatcttctcaacaacgcagtgaggccagcactagatctctatttcgcaggtgaggaaactgaggaccaaagggattaagtaacttccctaaagttacggagctagtgaggggaagagtcgggatgtgaacccggagactcgctccagtacccacactcttaaccaagggattcaagggatgctcaggacagaaagtcatcagggcttgcgattatatgaatggaccaggggtggaagtctcagggatgcccaggttactggcttgagcagccagtgggttggtgccagcattcgcttcagaaaacacaggaggagctgctttgtgaggagacagcatggcgtcacaagtgtctgcggtgcggcaaacggagatgtcaagtgtgctgtcagacgcagggctctggagctgaccggagaggtacagatttgggcactgctggcattctgtgataactgaagttgaaggaagaatgggaacgaaaagagaaagaggacacagggacaaaacctcgtgaagaacacgaatatttagagaacaagccgctgaagagaaactctgcggaaaaaaaagaaaaagccagagaggcaggaagaaaccaggtgggtgccgtttcagagatgcccagaagagagggtttcaaaaaggaggctattaataaccttggtgagagcattcattggagtgacggggctgggagggctgcagaaggttgcgtaaatgggaggcaaaggcgtggagatcatgctttcaagaagtttggctttgactggcatggcccaaatttatggccaagatatctaagctcacaaagggataaaatggcactgttaataacgacccctcatctatggggtcatcaaagcccccacactattcctgtttgttgtctactgaagctctttcatttatttctacacacacacacacacacatattttttacaactgctgtgtgtgacaagggctgctaggctctggggaaacatcaggatgggacaggcgacatctctaccttcaggtgtatacgttctgcggcattccctcgctcctcctgtttattcagttgtgcagatattggcagagtcaggccgccccggactcatggtgacccagcgtctggtctggtagttatgaaatctcacatggtttatcatctggccctgaacaatggggaaaacttgtgctcgtctcttgggggctattttctctggagtatggaaagttggtcttttgacagtcagaatctgaaactacaatccaatgtgtatttccagtctacacacaaaacatacattttgtctctaagcattttaataatcacttatgggactatgttttaaaagatcacttttagcttttcatctgaatgtgtacctgcatagaatgaagttacctttgcactcttttcagaaaacgatggtgttaaaacaggcagaaggataagctcctgctgctactgtgggaaagagaagcctgtctgaatcttattcaggcagagaccataaagactcataataaaaatatgttaatggtcactaaaggggagcatcccagagtccacttggatgatacattttggttgccaaagttaatatagaaagccggttaatctatcacggctttagagcagggttaatttaaggaggcttctaagtcaagaggcatgaaataactttgtctaaataggaagtagcaccctttgaattacttgctaagttacctctgacttcacaatcacctaccaaataaaggactttaaaatgcctgtaatcccagcacttacagaggccaaggcaggtggatcacttgaggtcaggagttcgagatcggcctggccaacgtggcaaaaccccatctttactaaaaatacaaaaatttgctgggcgtggtggtgcactcctgtagtcccagctacttgggaggctgagacagaagaatcacttgaacctggaaggcggaggttgcagtgagccaagatcgcaccactgcactccagagagagactccatcccctcaaaaataaaaaaaaataataataataataataaaataataaaaataaaattgcctacaaaagtctctcttccttcccataaactctctattacattgtattttacaatatttagaaacatcgtggtgccacatgtaattttttatttaaatacatcaagtcttcatgagattaaacaaatattacgggaaccaagaaaacggtattagtgtcagaccaagaagatggtgggttacctcagtataagcaaacattctctgtgtttgcttgaagttcatactgcactcagtcagtttgaaaaactgaccaggatgaacaagaaacagaaataacagtatggaaataaaactacatgagataatgcttaattcatggatctcagctttgtgggcctactcaaccagatggccacttgaagccaagaatttttccccagcaaacacagagggttggggtgggggtgataataaaatgtgagcaaggcgcatgtttctaaaatagcactctgtattctcttctatcgctcacctttgaactgcttcttaatttaaaacccactcatggttatgcacacttctgttttaagtctttctggtgataatgtcttgtgccaaatctgtgctttagaaatcaacataagaagccatattaagtagggagagagaaaggaggagggagttggaggcaggtggagaaggaaggagggggtcctgccttgctgaaagcaagagcgagtaattcttcttggcctcaaaattctacatatctgtgaaattttaatgggggaatattctaagaactttgtgacatacacgttcttctctagtgtaattttccagtgaattccaaccaagttttcctgactgaggggaacagaatctgattgcagaatgtttttcagtgctctaaaagtcatgcatacgtaccatccctctgttttatgaccacatttgtcaaaagaactgatttgaaggagcctgttcttaataacaatcaaagtcttattggtttcttactatgttctcataagagaaagacatcactaaagttaatatgctgttaagcaataaaggaaatgtaaacaatctaacctcctccttagacggaaggttgctttgaaataaaatctaaatggctattgttaataccggacaatcaggctcgaaaattactccctttccacaattaggtgattggagaaggatttcaggagaccttattcaaccttttccccaattgattaatttgtaatgtcagacattataggatttgtttaaatcttagctctaaaaaaaactttgcattttaaagtcttagcttataaacatgtcttgagtataagcaacaaagtttacgatttgggcccaatttaagaatactgtgactgcagagaaaaagggggaattggttgggaaaggtaaggagatctttcaactcttccagccaatttggcttaagagttgggggcggggtggagggtggggaacagacttgtgtttggcggtgactcttcattttactgtgaaactaggagagataggtggtcacatttcgaccatcaagcccagaagagaggagaaactcaacgtgtaattgggaaactctgggggaggaaacgtcacaggtttgacaagcaattcagtgccatcattaataacaatatccagccagagaaacataacgagaccccttctttacaaataatttaaaacattagccagacatggtgttggcctgtggtcccagctaccaccgggaggctgaggcgggaggatcgcttgagcctgggaggtcgaggctgcagtgagccctgactgcaccgctgcactccaacctgggagacagagcgagactccttctcaaaaataaacaaaatcaatatcgaccatttcgcattcagaagcccagtgggccatggtctgtgtataccttttctgaccagtggcgtctgcaggaaagaatgtgggtgccagtgagcaaaggttcacggtctcccccaaacctgtccctctgagacagaaaaatgctggggctggggtcagccgaggggaggggacggccaggccaccggatgtcaggcccggtttccctccagaatcttgtaagtcgaaagggaaggttgtcccccatcctgggagaactggagcggagcggcgggggcgagggggccgttacctgtgggtctgcccttcctcccctgccggggctacaggggtcgaggggctgggcgggcgggccggtccagggcgcaggagccgcccattaattgcgcggggacggccctgagctcctcttcctcctcctctttttgcttcttcactccctacacctgcccctcttcctcctccttccccgaggctgctttccgcggcgccggccggccttgcctggggcggaggcggtgggggcggctaccgggcgtcctccggtttccctagcaaccgcgcctccccgcccccgcgcgaccaggtgcagccgccgagagcacggggcggggcggggcggggctgtggccccggggtcccaagccagtcgtgggcgcccgccggttgccgtgggaacgaggcgggctgcagtcggggagtcagagccacgctggtgggcagagaagagatgcccaaggaggaggcggttggctttgtctgggtgcccaagcccagacccagatatccaggcctctgctcccttccctgaaagggtgctgtgcttcataaaaaatgagattagaaaacgagagaggaaaatatttttaatggaatcagggaatgtgaaaagcggtacatgcgaagaggaaaagatactgcagtcctggagttcgacctctgcagaggacatctggaatgctctggtccaacacgaaaaagaagaaataagcgatgaagccaggcacccagtcagtggcagaaccgacattagagcccaggcctcttcgtaatcagtcgtcttcaccccctttccaaggagagaggtgcttagaggcctagaccaggccctacagctttggagccagggcaccagaaccgctactaccctcaccttctctgtgccaggttgatttctttctttttcttttcttttcttttcttttttttctttctttcttttttttttttttagacagagtcttgctctgtagctcaggctggacagtgcagtggcacgatcttggctcactgcaacctctgcctccggggctcaagcgattttcatgcttcagccgtccgagtagctgggattacaggcatgcgccaccacacccggctagtttttgtattttttttttttttttaagtagagacggggtttctccatgttggccaggctggtctcgaactcctgacctcaagtgatccgcccgcctgggcctccgaaagtgctgggattacaggcatgagccaccttgcccggctttgccgggttgatgtctgtctgtggttctcatgggcaaagatgactcccctatttactttgcatatttaggctctcaacttgtcaactgatgtcaagttagggtatttttgattgagtggagagtaaggtaaaggaagaatagaaattcttggaactttcatcagtgcccggaatccctaggtgtctgtggtttgaccgtcttctcaacacctccccttccccccattcagttggtgccaagtccttggcagcgtcacattcttctttctattcttatcactctagttttgggctccatgacctagttttgggctccatggattattctgagggcctcctggtcacaccctgggcgcctgtcctccacaccctatcttcaccatttcccccatcctataagcagcctacatctaatgttgctggccccctgcttaaaaagccctgaaaggttcctcaccgcctgtggaatgaagtccaaactcgtcactatgactttccctgtgccctcccccacagtttcctttcttggtttttccccttcatcacttcttcactcatacttcagccagatgggactatgtgttacacactgaacatttttccttgccttcacaccagcttcaaagacatatcatgagctgggcagagtctagacaaatgtacttagctgaagtctttccactgggcactttcccatctgaacttcgctggtcctccagcagaccctaggatcttttcatctctagtagcccagtccatattctgttcttgttctcagctgattatcaagtattccttagtaaagcattaactgataattgaagtattaactgataaggatgtaacctaagaacttgcctcatggtttttgcctttcaaaaggatatgctttgggccaggcatggtggctcacgcttgtaatcccagcactttgggaggccgaggcagggggatcacctgaggtcaggagttttgagaccagcctggccaacatggtgaaaccccatctcaactagaaatacaaaaattagccaggtgtgctggcagccacctgtaaacccagctactcaggaagctgaggcaggagaattgcttgaacccaggaggcggaggttgcactccagcctgggcgacaagaaactctgtctcaaaaaaaaaaaaaaaagtttggatgcgcacactgggttgaaactataatagtgaaatgataggtagggagcttgttctgttggcgcgaggacccacctcaaataaaaataacagaggaggaagttgaagcccaggttctcaccttgttgaaggtaagggacatgaccagaacatatggtaagtaccagaaccagggttcaaaaacagggctttccatctccagtaacttgatgttgcccactactaagaaaagcaccttggtacttcctgtacccagacaagatctattaaaataatactatctatctcaaaagcttgctgtgggaattaaatgagagaggacaagcaaagcatttcacatcatgcttggcacatagcactcaataattggtagctttgctttataaggcataacttaagattttattgcatgtgaatgttaaccgtaaatatttaaagatttttatttatttttaattttttaattttttttttttttgagccagagtctgtcacccaggctggagtgttatagcgcgatcttggctcactgtaactgccgcatcccaggttcaagcgattctcctgcctcagcctcctgagtagctgggactacaagcacgtgccaccatgcccagctaatttttgtatttttagtagatacagagttttgccaggttgaccaggccagtctcaaactcctgacatcaggtgatccaccctcttcggcccccacaaagtgctgggattataggtgtgagccactgtgcccagcctaaagatttttaaataacaaggtctggagaagtcacttcatatctcagctttaaactcttccacatgtcaagtgttcttgaaaattaagttatatgaaaaaatcatggtgcctttgaaagagggtaatagtgcccaaggtcagctcataaaaagctatagagcaactccaactttagtgtttaatgagtaaatttaagctaggcatgtaaattacaaataagattagttctggcattaaaaagcaaagtccttaggaggagaaatattaaaatgaagaagaaaaacttctcctggttggggaaaggatcctactcttcattatttcctgcacaatgttcctggtagagatgaataagtaaacaaaaaaacttaagacttaagtggatggtagattctaatgctccctcctgctgatctaacaaaataccttagactagctaatttgtaaacaacagaagtgtattgcttacagttctggaggctgggaagtccaagatcaggtcatctgcagatttggtgtctggtgagggctcactgtgttttgtatatagcatcttccctttgcatcctcatatggtggaagggacaaactccctcaagcctcttttataagggccctaataccattcatcatggtgaagtcctcatgacctagtcacctcccaaatggcccgcctcttaataccactacaatgggaattaagagtcaacatgaattttggaaggacctaagcattcagaccatagcaagcatgaaaaagttctttaattatatctaagagttctgcaaagaacaacttcaagtataaagtttcaaaagtagactgtgtattaagtttcagaaataacacttttgagggaaatatttaatgcaaagagtaagctgtgcagaggaataggcatacattctaagtctcccaaggtttttgagacagggatatccaacagcttcatggacacctggcccagctactcacttgagctggagcaccccaccctctatctgcctaatattttctcttcctaagagagagagagagtctaactaaaagagtctctttgtaactaactattcagaagctctcctattgggcatagagttttatgccaagtgacttcagaagcagatggcctccctcagatacaacttaaacttggtcatttttgccttggtcatgggatctcgccatgactaatgggttcctgttctcatcattgaggccagtgtggtgttgccttcatccatgcacacagcatgaactgcggcagtttgtttgcaaaaagaatctctaggaatagctttcctgagaagggaactgtggacatgtgagtcctttagagctccatgggttctcctccagcatgccattgtgcaggggctttccctgattcattttcaaaactggctaatgacttattgggtataccaggggccgctgtgacattctgcattcatcttgtagctgtatttggccagactgtgggtatgcaatgtgataatctctcagtgtcactcattaaaagtcatcctttattgatgtcatcagatggttagagagcttggtaggctttcaaggtgagccttctggattatgtacatacagttggcccttaaacagcatgaatttgaactgcccaggtctacttatacattggttttcttccacctctgccacccctgaggcagcaagacccactcctccttttcgtcctcctcctcagcctgctcagcataaagacaatgaggatgaaggcttttatgatgatccacctccacttaatgaatagtaaatatattttctcttccttatgattttttttgacagggtcttgctttgttgcccaggctggagtgcagtggtacgatctcagcccactgcaacctccaccccccaggctcaagtcatcctcccacttcagcctcccaaatagctgggaacacacgtgcatcaccatgcctgcctaatttttttttttttttttttttttagagatgtggtctccctgtattgcccaggcttgtctgagaatcctcagctcaagcgatcctgtcgcctaggcctcccaaaatgctgggattacaggcatgagccaccacacccagcccaataatagccattctaaatagggagagataatatttcattgtggttttgatttgcatttctttgataatagtgatgttgaggactttttatatacctgttggccatttttatgtcatcagagatggctattcagctcatttgcccatttttaagttggagatatatctccaacttaaatgtgtgtgtgtatatatatatatatccaacttaaatgtgtgtgtgtatatatatatatatatccaacttaaatgtgtgtgtgtgtatatatatatatatatatatatatatatatatatatatatatatatggctgttgtttgaattcctagtatattctgagtattaattccttgtcagatgaatagtttgcaggtattttctctcattcttcagattgtatcttcaccctgctgattgtttcgtttgctgcacagaacgtttttagtttgatataatcccatttgtctattcttatttttgttgcctgtgcttttgaggcatattcataaaatctttgccaagaccaatggcttcaagtgtttcctctatgttttcttctagtagtttcacagcttcaggtcttatacttaagtctttaatccatcttgagtttatttttgtatatggtgtgaggtagggctctagtttcattcttctgcatgtaagtaaccagtttttctagcaccatttattgaagagactgtcctttccacaatgtatattcttggtacctttgttgaaaatcagttggctgtaaatatgtagatttatttctgggttttctgttctattccgttggtctatgtgtctctttttatgccagtaccatgtgctttggttactatagccttgaagtatattttgaagtcaggtagtgtgatgcctccagctttgttctttttgcacaggtttgctttggctgttggggtcttttgtagttccatatgaattttagtattgttttttctatttctgtgaggaatgtcattggtgttttgatagcaattgcattgattctatagatcacttttggtaatatggtcattttcacaatattaactcttctagtctataaacatgggatgtcctgtgagatgtccaaagacatcccatgttcacagactggaagaattagtacacacagacacacacacacacacacacaaatatgtacatattccgatggaggttattgaagacccaggatttggtccttgatttgtaggatcagaaaattcactttatttaattcagaactgacctctttagaaattgattcttaataaccccactcagaagagaccatttgttatccacctgaccaagttattattttatctcagagaatgaagctggcaggctgaccctggtcatatgcttgaggtacttcctcctggtggaaaggcattcctaggagatcaaattaaagatctgaagatttggtgaatattaaattacattaaagggaattgaatgtcctttttttttttttttttttccccgaaacagactcttgctctttagcccaggctggagtacaatggcgccatctcagctcactgcaacctccaacccgggttcaagcaattctcctgcctcagcttcccaagtagctgggattacaggtgcctgccctgtaattagcatgcctggctaatttttgtatttttagtagagacggggcttcaccatgtcggccaggctggtctcgaactcctgacctcaggtgatccccccacctcggcctcacaaagtgctaggattacaggtgtcagccactgcactcggcctgttcttaagggatacatctagcagattgacgaggccttaacgaatgaccttcctcccctcaaaggacatttcagtctggatgactgatttggattatttatgtcaaagtttttggagacttttaccacatctttctctcaggtaactgccgttttgctgaacttcaagggaccatttctcttatgccattaacagcatagtttggagttgagaagacctaggttaaaatcctagcagtgggatttgttgtatcatagcgaacaattctcatcaccctttgaatttcgagatccctgtagttaaaagtggaaataatcagagccttctcaatggattgtcatgaggattaatgaaatagtgtatgtaaagtttctggcattgtgcctgacacagtagctgctcaacaaacggtagctatcattattgcttacatcatgtacatagatttcattctccttgctgagatgagacaccctaaagtacatcacccatgcatttataaagcatctctaaaagctgttactttggccgggcacagtggctcacacctgtaatcccagcactttgggaggccgaggcgggtggatcatttgagttcaggagttcaaggccagcctggccaacatagagaaaccctgtttctactaaaaatacaaaaattagctgggtgtggtggcgggagcctatagtctcagctacctgggaggctgaggcagggagaattgcttgaattcgggaggtgggggtggcagtgagccgagattgtgccattgcactccagcctgggagacagagtgagactctgtctcaaaaaataataataataaataaataaaagctgttacttctttaaaatgctactgatacctttgtggttaattttatattgattactttttatgctgaatttcagaaagtgacattttatgatcgcatctctgatttttgttagagatcatctaatttcatgaaactgagagcgtatccagtttagggcttgcagccatccatgaactgtgtgaaatttagtaatgtctgttgggctttcatagggcagatatttgagatccagttcttttgtagaatgaagtagactccattagagactggcaaattccctataattaattacaattttttaaaaaaagcatgtcctctgggagatcccttagaattttcctcacttgtaactgtagctgatctattgtgctgttttacaaagagggggcaaactcattaaagtttttggatcctatagtactgaaatattactcaaaagttcaaatgggctttgatttatttatctgttttggaagcttcagacttttcaaaccattatggccgttaatgcatctgatacaagattggatgtgattataggaactttgagaacataaaacatactgcttttttgcatttctgaaaaattcttaccaaaaggaagaatttgacttctgtccagaaggagtatctgatttgtttggactctggataaactcgagctgtgcatatttggccaagagtttgatttgtggactgatcatcgagccgtgggcaagactcaggcttcagaaagcgatgtcagtgtcaagaatcccacatgaacattaaatatgcttctggacagataaacactcgagccaaaaaaaaaaaaatccatctcatcaagagggcagaggaacataagcactgagcaacttctgaaccttcaggaagtggacgctactccacaacattttgtttttgtttttgtttttgttttgagacagtcttgctctgttgcccaggctggaatgcaatggtgcgatcttggctcactgcaacctccgcctcccgggttcaagcaattcttctgccttagcctcccaagtagctgggattacaggcatgcgccactatgcccagctaattttgtatttttagtagagaaaaggggacccccatacactgttggtgggaatgtaaattagtataaccactgtggagaacagtttggaggttcctcaaaaaactaaaaataggacatatgatccagcaatcccactgctgggtatatatccaaaagaaaggaaatcagtatattgaagagatatgtgcactccatgtttattgcaccactgttcacaatagctaggattttgttttgttttgttttgagacagagccttactctgtcacccaggctggagtgcagtggcacaatctcggctcactgcaacctccgcctcctgggttcaagcaattctcgtgccctagcctcctgtacctgggactacaggcacccagcaccacacttggctaatttttgtatttttagtagacgcggggtttcaccatgttggctaggctggtctcgaactcctggcctctagggatccacctgcctcggcctcccgaagtgttggaattacaggtgtgagccactgtgccaggcctctgacaaagctaagatttggaagcagtctaagtgtctatcaacagatgaataaataaagaaaatgtggtacatatacacaacggagtgctattcagccataaaaaaagaataagattctgtcattttcagcaacatggatggaactggagatcatgttaggtgaaataagccaggcacagaaagacaaacattgcatgttctcacgtatttgtgggatctaaaaatcaaaacaattaaactcatgtacattaagtgtagaaggatggttaccagaggctgggaaggatagtggggagggggtggaaggaaggaggatcatgttaatgggtacaaaaaatagaaggaataagacctaccatctgatagcacaacaaggtgactataataacttgtcaattaataataacttaattgtacattttaaaataactaaaaaagggccgggcatggtggcttatgcctataatcccagcactttgggaggccgagacaggtggatcacgaggtcaggagatcgagaccatcctggctaacacggtgaaaacctgtctctactaaaaatacaaaaaattagctgggcgtgatggtgggtgcctgtagtcccagctactcaggaggctgaggcaggagaatggcatgaacccgggaggcgaagcttgcagtgagccgagatcgcgtcactgcactccagcctgggagacagagcaagactccgtctcaaataaataaataaataaataaaaataactgaaagagtataactagattgtttgtaacacaagggataaatgcttgaggggctggatttgccattctccatgatgtgattattacacatcgcatgcctgtgtcaaaacatttcacgtaccccataaatatatatacctaatatgtacccacaaaaattaaaaattaaaaaaatttaaaaaataaataaacactgactgacaaatgctaatgagtgccaggacactaatagagtgccacaacagagaatattgggaggagcagggagaccctatttacacaggtggtcaaagatgacctctctgtgtgagacctgaaggatgaagagaagccagcctccgggggtggagaaaacaggactgagatgattgtaaggtgagagaaagctcaggggattcaagaaagcttaaggtgtggctggaagactattgtgagggaagcctggtgaggttgtgagagttggagtcaggttttattctaagcacaatggaaagccatggaatggctttaaagtgtatgtgcattcctctgtgcgtacgtatgtgcatgcacgtatatgcgcgtgtgtgtgtgcatctgatatatcgtctggagcatattgtagagacccatgagaaggttccccactagaattggtagttatgacctcgtgatccctactacagcctttgatgaaacatcaaaatgtcactcaagcatgagcttgtccatcagcatgagacatgatcaaatatgaattatcaaagaaattttccccagttctgggacacacacatgaccagatgttccatgttgggtagcatagcctgatttttttttttctgatgctgagttttgctcttgtcgcccaggctggagtgcaacgggcgcgatctggctcactgcaacctccgcctcccggattcaggtgattctccctgcctcagcctcccaagtagctgggattacaggtgcatgccaccatgcctggctaatttttgtatttttagtagagacagggtttcatcatatttgtcaggctgctgacctcaggtgatctgcccgtctcggcctcccaaagtgctgggattacaggtgtgagccaccgcacccggccgcatatcctgatttttaacttccagcctcttgttccaatgcaatcctcataatgtcccttactgatgtccctctttgttgcatcctgggtcttgctccttttactcccctctcttttctttctcttttgatctccgcctgtccttcctcttctctcctttcccctcccctctccatccttcctctccttctcttctctctgcctttctcattaagagtcaaagttccttgccaaaccacagctcttaggtttctattttcccgaacagatttcttggctggttttacagacttttcaattggttctctcttctgcttccatgtagtctcttctctgtttccagtcactgctcctagacactctcctcccctcccttaacaagcctaacccctaggttacaaagtttgaaaaatgtcaacaggaaaaagggctcttcctgtagccctgtaaaaaagaagacgtgaaggagttaacctcgagcgacatcagtctccagccatcagtacagtgaggcagttcttgaaaaccagacagaacagaaggtatcactgtgcaacgtcccttctgtggctcacggcgccctctgagtcaggataatgagagaacattcttaaaacatgacctaaccacgctctgtcctcaaacaaattcctggatgtgtgtggagtaagctctcccagcaagcctgagcacagacgtgcggggcgggcttgttagcactcttctgagttgctccctttacaaagccaccttcccagccagttcatttgtattaaagtaaacttttaaaaataaccagtcagtctgtccagcaaacatgctatgggcctcttatggctgtactttcataattttatattgtggcgactgggtctctgtcttggggggtatttgggggcctttgacttcacactgtagcaggaagaagttatgcaaaattctcgtcagatatagaaaaaaggaaacaggatatcattcatttccagaatggagcagaatcacaacacagtgattgtgattgcagagtgtcctttatttcacctacacctgaagttgtgtgtgtgtttgtgcgtgtgtgtgtttaatacaggcggcttatctgagtgattttaagaaattaatttaattgaaaaatgattaaattacaaagagaggaaaaagcatttggttggcattacatggggtcagaggccactgctaatgcaatatttcatcaattgcctcattgctattctttcaatgatgtgatttagtttctcaaatagctcttatcctggcaggcttgccttagatacattgtacagaggccttataatcattacaatgtatttacttaaacattttaaaaacaattaagcacttttagatatatttgtgtatgtgcgtgcgtgcatgcatgcgcgtgtgtgtgtgtgtgtgtgtgtgtgtgtgtgtgtgtgtgtgtgtacatgtccacagagggattttataaatgtccggacaagggttctgagtgaacactaggacaagtgttgaatttatccactgtagtgcccttcatgcatttcaaagagctccatgcagactcatgttaagcttttttcatgccctttgaatataccactatctccctttaatacactgaagaaacaagaggacaaagagtctccctgtgttccttatccaaggccacacaactgttgctggaaccttgagctttctgagtgccaggcacttacttgcagtatatcgaacgctgggatatggtggaggtttagtttgttaaaaagtgtgatagccctatgattgtgggaaaaagttttgacatactttgttttttattttaatgcagatcaagtcattataatggtctttctcttagaaggctactgaggttgggttaaacagtaacaggggtgcttgggaaagggtagagcaacattttggcagcatatgaatgggtatgtgtgcacatgggtggtaataccgcatgccctgacctgtcctatgcctcttccccttcacctttgtttcaaaatgttgtgtccagcgttgaaaaatgctggcacagtttgatgcaggtgtttgcaacctccttcaccccaaatgccatggtggtggggatgctaggctctcttagcatccccctcctcgtgctgcatgaggtgggaaggcaaaatcatgtattcattcatcaaacgctgatcaagcacttaagtgctaagtactgttcgaggttctgcggattcacagaggaataatattcggtctttgtgctagcggggaggtaggaaagtaaacaaggccatagagtaagctctacgatagaggtagatgtgggcctgggtggtggtgggggcacaggggagatgaaggagaggaaaaggaaggttctcacggtgagggatggtgaaaggcctccaagaattgctggaggccccattcagtggtgggtgctggcgcgtcagttccctctgagaggaagcatttctcagcagcaccaaacactggctagaccttgagctagatgacgtttgttgtcaactctcccagccttcctgtctgcgccctttccctccctgtctggaaggaagctcccaacagccttttcaaaatctgcttagggcagctatgcataatcaatatttattgaatcaaattgatctgaaaagtattcgcactacggtataaatggctcatacagggtacacctgggcacatgtacctggaagcctcaagctaaaagagcttttgccagctcagcaggagagcttcatagtatgttggaggctcctacacccgagtgcacattttctggatggttgcccactttttctgtactttaagctggccctacttccaagcgcccagccttacatgttttcccttccctgcccactattgtggctatatgataaggcaggatgagggccgataactgctagtctcagaccttttggctagaaatgccacaagactacagcaacaactgctttgaagcctgggagagaccagtgatgaaaaacaaagttgcggccaggcacagtggctcatgcctgtaatcccaggactttgggaggtcaaggcgggcggatcacttgaggtcaggattcaagaccagcctggccaacatggcgaaaccctgtctctactaaaaatacagaaattagctgggaatggtggtgcatgcctgtaatcccagctacttgggaggcagaggcaggacaatcacttgagcccaggaggttgcagtaagccgagatggtgccacacactccagcctgggtgacagagcaagaaagaaagcaaaagtaaaacaaagttgcagtgaatgggactggacgtttaaatgtctcttttaaatgcactcactattttggttcatggtttaccactcgtatgtttactgcatgagggcagaactggtgtggcacatacattgaaattctacctctaatgtgagatagaaagcagggggaactgaccaggaacctccaccttattcccagtcatagcgttccactaggattctcccatggaccatatttcagtgtacaaaattgtcatattcacagaaagtaccacatttgtttccccaaccatcagggttgtatagttacagtcagtgccctgtgcagtaaagactggcaattggatgtttttcagaccttcaacttagttcattatgagaagctgtctaaaaaaacaaacaaacaagcgaacaacaaactacagtcttcaattaaaggttcagaggccaggcacagaggcttatgcctgtaaccccagcactttgggaggccaaggcaggcagatcacttgaagtcgggaattcaaggccagcctggccaacatggcgacaccctgtatctaccaaaagtacaaaaattagctgggcatggggtggtgctcgcctgtaattccagctacttggaaggcatgagaatcacttgaatcacccaggaagcagagctcacggtgagccgagattacaccactgcactccagcctgggtgacagagcaagactctgtctcaaaaaaaaaaaaaagaggttcagaaagtggacaccttttagcactatctaatagaaatatgagtcatataagtaatttcaaatttcctaggaataatattcagaaaagtaaaaggaaatgggtgaaattcattttaataacatattttactaaacccactaaattgaaacattgtcgtttcaacatgtaatgaatattttttatttttagaatcagagcctcactctgttgcccaggctagagtactgtgatgcaatcatggctcagtcaaccttgaactcctgggctcaagccatcctcccaccttagcctcttgaatagttgggactacaggcctgtgcaccaccacacccagtgatttatttttatttttatttattgtagagatggggtctcgctaggttgcccaggctggtctgggactcctaggatcaagcagtcctcctgcctcagcctctggactacaggtgcatgccaccttgctcagctaattaaaacatttttttttttttaatggagacagagtcttgctctgtcacccaggttggagtgcagtggcatgatcttggctcactgcaacctctgcctcctgggttcaagcaattctacctcagcctcccaagtagctgggattacaggcacccgctaccatgcccggctgattttttgtattttagtagagacagagtttcaccatgttgcccaggctggtctcgaactcctgagcttgggcaatccacctgtcctggcctcccaaagtgctaggattacaggcttgagccaccacgcccggccaacactttttttttttttttttgagacagagtcttgccacccaggctggagtgcagtggcacgatctcagctcactgcaacctctacctcccaggctaaagcaattctcctgcctcagcctctcaagtagctgggattacaggtgtgtgctaccatgcccagctaatttttgtacttttagtagagatggttccagctacttgggaggctgagacgggaggatagcttgagtctgagagggtgaggctgcagtgagctctgattgcgccactatactccagccaggacaacagagtaaaacattgtctcaaaaattaaaaagaaaaagaaagaaaatgaaaaacaatgaccacacctctatatgtgtgtgtgtgtgtgtgtgtttgtgtgtgtgtgtgtgtgtgagaaatgaatgttctttgctggcaatctgacatacaggagaaattaacagagttaatggctattctggcatctgctcccaagccactgagaccacagaattagaggatgggaagggaccttggagatcttgttaactgtgtcctggaccctcattgcaaggaatcagattcaactggcctagggaggggtctaagtatcaacatttttagacgtcccctaggtgattctaacgtaggggctgggctctaaatgcagaaacatcccttttgttttataggtgaagagacaggggctaactgaggtcagtgactcatcttacagcttgttagaggcagagtgaagcccggaatccggatattcttctctacccagctcacacagaggacatttccataataccttcatcatgggtcattctcttgcttaaccccagagttgctctcattttgaattgagacacattcctccgcttaacctagcttagacacaaacttcaacaaacttctctgaacccttacttgccaagaaaatcttcagatcagtgaaaacattgaagtgattctggtccgggaccatggctgtaaatgcctcccattttagacccaactgggacctgacaccctatactgaatatagagtttaattagagggtacagggaggggccccaaagaagcaaacacttgagtctgatgagtctcattgatgcacagcctaagccagagtgacccattaacagggtctcacactcagatatatctgagttcagagcaggtaatgcatgtgagtagtgtgggttaggtgggggctctggcccaagctcctcctagctatgcggggaggatgcaatgcaagtccagtccttccaatttctcaaagaagtcgcaaatttgggtttttgtttgttttggtttttgtgaaaaaccctgttttgtgaatgttggcaactagtttgatttttagaaaaacactgtaagagtcaaataaaacccactcgtgagctatattctgcttgtgaggcttcagaatacatcttttagataagtccaagacttttttttttttcagatggtctcgctctgttgcccaggctgaagggcagtgacacacagatcactatagccttgacctcctgggctcaagccatcctcccatttcagcctcccgagtagctgggattacagacatacaccaccaaggaatatgacttcatcatattcaatatcgagttttactggtttctaaaatgttggcctaataccatcatgtaggttgagcatccctaatccaaaaattcaaaatccgaaactttttttttttttctttttttgagacagagtcttgctctgtcgcccaggctggagggcagtggcacgatctcagttcactgcaagctctgcctcccaggttcacgccattctcctgcctcagcctcttcagtagctgggactacaggagcccgccaccacgcccggctaatttttttgtatttttagcagagatgagttttcaccgtgttagccaggatggtcttgatctcctggcctcgtgatccgcccgcctcggcctcccaaagtgctgggataacaggcgtgagccaccgcgcccggcccaaaatccgaaactttttgagcgccagcatgacaccactaggggaacgttccacactcgacgtcatgtgatgggttcagtcaaaacattgttccatgaacagaatcattaaaaatattgaataaaattaccttcagggtatgtgaataaggtgtatatgaaacataaatgaatttcgtgttgagacttaattctattctcaagatagctcattttgtatacagaaatattcccaaatctgaaaaatatctgaaattcgaaacacttctgatcccaagcatttcagataagggatactcaacctgtccttaccttgccttagacattgtgaaactgatgacagtcaacactggtaccagaaggaaaagtaattcagaagtcccacctctgttccccttttaaatgttactcattttctcactttccactttattatttattttgggtgaggcacttgtgattttttttttttttttttgagacagggtctcactctgtcacccaggctggagtacagtgacacgatcatggctctctgcagccttgaccttcccagtcaagctcaggtgatcctcccacctcagctcccgagtagctgagactgcaggcatgcaccaccacacccggctaatttttgtattttttttttttaagacagggtttcaccaggctgcccaggctggtttcgaactcctgggctctagtgatccacccacctcagcctcccaaagtataggcacgattccacgactcccagccataaattttcataatgaagttgaaattaaagattattacagttcataagatccatataatttatttcaaagttctttttgaagttgtgagtcaggcttactagcatcaccatgggatagatactagttctgctatacacaactatgtaaggaaaaatgttttcattcactgcaaaatgagacggaagcttacattgtagcactggggcaacctcttagccaatgaaatgatattgcaaataaaaagcaaaattactcttacccacattcttcattttaagaaaacacccttggataagtacatagagtgagagtccttgatttgaactaatctaaggtattaataataacaggtgaatgcttagataatgatttaagagttgatgctaatttaccctttaattggaagtatttataaagcaaacataaatgtaagttatttgtgaagcatataagagatgaacagaaaatatgcatgtcatttgtattttagttattctccctacacatacataaccttgatttttgccacagttcgtttttctacatgtaaaaaacttaattagattgtgtgcttgtgacaatcagtttcaagtatatttctgtgagaagctccactgtccccaaataaccagaggtaggtaacagtttctgacaaaagcttgagggaacaggattaaatgataattacagcgattatattttatctaaaaccttcaagtctctggaaagctgcttggtttctattttgggccatgctgcccacatatcttaacgacagaatttatgcataattttgctcttcctgtttttatctctgtttgggtgtatttattacttcatatgtggtgatgcaaggctcattgaaaggtccatttatatcctggttatctgcatggggatctagctgcttttctctcgctgtttctagaactctcactgtaacattcagatttgctggcacccagccttttccagcacatatacattccgctccctcagtgactctatttatgggagtctatgtgatttactcaagactaataaagaccgtgtagaaggatgggtcatggatttatccatccatggaattttagcgcattcagagggaggtttatcttctgttcttcccccgctaccccccaatttaattaaaacaacaaaaaaggcgttagtccaaatgagggacagttggcagatctgcgttattcaactggagggactccctagtttctgatgcttggagatggacaagtaattacctcctgtctgtgactattttctaccaggctaagcccaatgtttattgtaaactatctgccattaaaagctgtaatagcaagccttatgttcccacaccataaatttgacttgcagtgtttttttatttaccttcatgttttattatattctttggaatgtttcattttaaaggaagataacgggagaatgaaaattgaacaaattccaaattcacgcttgaataaagatatgcttaacacacatactttttgcatacacccagacctctgatggccactttctgaatattggcagcttctctgtaactattagaggtagttgctataagtgtatcacttgttaaatggtcctgaaagtagcctaaaaatgaaagtttaagcagaccacatgggctgagggcagtgattctcaaacttttgcatctcatgaacacccttattcgaagaccccaaagagcttttgtttgtgtgattatatttatcaatacttactgcataagaaattagagctgagacatttaaaaatgcttatttatttattcgtttaaaaataacaatagggccaggcacgatggtggctcattcctgtaatcccagcactttaggaggccgaggtgggagaatcacttgagcccaggaatttgagaccagcctgggcaacatggcaaaatcccgtctctacaaaaaaatttttaaaattagccaggtgtcggccgggcacggtggctcacgcctgtaatcacagcactttgggaggccaaggcgggtggatcatgaggtcatgagatcgagaccatcctggctaacacggtgaaactctgtctctactaaaaatacaaaaaattagccgggcatggtggcaggcgcctgtagtcccagctactcaggaggctgaggcaggagaatggcgtgaacccgggaggtggagcttggcagtgagcagagatcatgccactgcgctccagcctgggcgacagagcgagactcggtctcaaaaaaaaaattagccgggtgtcttggcatgcccctgtggtcccactactcaggaggctgaggtgggaggaaaacctgagcttggcgggggtcgaggctgcagtgagctgtggtcacaccactgcgatccggcctgagcaacagagtgagacctgtctcaaaaaacaaacaaatgaaaaaaccccaaaccaataaatcattatatgttaacataaataccatttttaatgaaaaataactattttctgtagcaaaaaaaaaaaagtttaataagaagagagagattgttttggattctgtttgactttagaagacagctggagtctcatatctgcttcttcagtctgctgtaatatgttgctttggttgaaatatatgaaaaaaacctgcccctacacagatatgtagttgtaaaagggaatattttaacagccttttcaaataattatggatattctgctttgatcccagaccaaaacttgacaagtggagttttttttttttttgagatgaagtcttgctctgtcacctaggctggagtacagtggtaggatctcaggtcactgcaacttccacctcccaggttcaagtgattctcctgcctcagccccccgagtagctgggactacaggtgtgtgccaccacgcccggataaattttgtatttttagtagagatggggttttgccatgttggccaggctggtcttgaactcctgacctcaagtggtccacctgcctcagcctcccaaagtgctgggattactggtgtgagccaccactcccagccaaaataaacatttctgtttttttttttttttttttttggacagggtttccctctatcaccctggctggagtacaatggttcaagtgattcttgtgcctcagcctcccaagtagctggattacaggaatgcgccaccactcctggctaatttttcttttttttcctttctttctttctttttattttattttattttatgcttttttaaagcagaggcaaggtttcaccatgttggccaggctggtcttgaactccagacctcagatgatccacccgcctcaatccaaagtgctgggattatgggtgtgagccaccacgcccagcaattaagtgttagtttcttaaaggttagttgcaatgtggaaattaaaatcctttcagtggatttttttttaaactaatagattttatttttttttagagcaattttaggtttaaagaaaatgagaccatttggagggttcttatgtgccccctttcgccacattttcctatattaacatcatgcattaatgtggcacatttgttaacaattgatgaatcaataatactgtacatgattattaaactaaagctcatagtttacattaggattaattatttgtgatatacagttccatgggtttggacaaatgtataatgatatgtgtccactattacagtaacctatagaataattttactgccctaaaccctccctgtgctcctcctattcagcccttctcttcttcccctgaacccttggcaaccactgatcttttgactatctttataggttgccttttctagaacatcatatacacttgacctttaaacagcaggagttttaactgcacaggtcctctttcacaagatttttttttgtgttgagacagagtctcgctctatctccaggctggagtgcagtggcgtgatctcggctcactgcaacctccgcctcctgggttcaagtgattctcctgcctcagcctcccgagtagctgggactacaggcgtgccaccatgcccagctaatatttttagtggagatggggtttcaccatgttggccaggctggtcttgaactcctgacctcaggtgatccgcccatctcggcctcccaaagtgctgggattataggcgtgagccactgcacctggccaagatttttttcaatgaaagttacacagaatgtgcttgcctctcctgtcaccgctcccacttcctctacctcttctgcccctgcaacccttgagacagcaagaccaaccctcttcttcctcttccttctcagcctacacagcgtgaagacaaggataaagacctttattttatttattcatttttttttaaggtggaagtcttgctatgttgcccaggctggagtgcagtggcatgatcgtagctcactgcagcctcaaactcctgggctcaaggaattctcccacctcagcctcctgagtagctgggactgcaggtatgcactaccctctaggccaaggataaaaaccttgtgatgatccagttccacttaataaatagtaaatatattttctgttccttttgattttcttttttcttattttttaaaagacgggatctaactctgttgctgaggccggagtgcaattgtacaatcttgtctcactacagcctcaaccttctgggctcaagcaatcctcctgccttagcctcccgagtagctaggactacaggtgcgtgccagtccacctggacaatttttttttttttttttttgtagagaaggggtctcaccatattgcccaggtgggttttgaactcctggcttcaagcaatcttccttccttggcctcccaaaacgttgggattccaggtgtgagccactgcccccagccggcctttccttatgattttcttaatattttttctttattttaagaatacagtatattatatatatatatatattagaaaatacatgttaattgactgcttatgttaccagtagggcttctggtcaacacaagacgattagtagttatgttactggggacttaaaagttatactcagattttcaactgcacacctacccccctgtgttgttccagggtcagctgtaattggaatcatacaacacatagacttttcagatgggcttctttcactaagcaatatgcatttaatgttcctttttgtggattgaatgctcattaattttgctcactgactattccactgtatgaatatactacagtttattcattcaccttttgaaaaatatcttggttgcttctagtttttagcaattatgaataaagttactataaacatttgtgtgcagatttttgtgtgggctaagtttccaactctttttggtaaaaccctaggagtatgattgctgggtcagatggtaagaatacatttagctttaaaagaaatgtaaactgccaaactgtcttcaaaagtggctgcactattttgcatccccactagcaatgaatgagagtttctattgctccacatctttgccagcattaggtattaataggtttttggattttagccattctaatatgagtatagtagtatctcattgttgttttaatttgcaattctccagtgacatatgatgctgagtatcttttcatgtttatttgccatctgtgtattttctttctttcttttttttttttttttttgagacagggtctcactctgttgcccaggctggagtgcaatggcacaatctcagctcactgcaacctccgcctcccaggtaaaagtgattcttctgcctcagcctcccaagtagctgggactacaggtgcgcaccaccacaaagggctaatttttatttttagtagagacagggtttcaccatgttggccaggctggtcttggacttctgacctcaaatgatctgcccgccttggactcccaaagtgctgggattacaggcgtgagccaccatgtccagcctaccatctgtattttcttgggggaggtagcttttcaactcttttgcccatttttaaaatttggttgtttgctactgctgagatttaaggttttaagagttctttgtgtatattggatactggtcttttatcagataagtgtgctatttaatttttgttttcttttcttttttgagacagtctcactctgttgcccaggctggagtgcagtggtgaaatcatagctcgctgcagctgtgaactcctaggctcaagccatccttctgccttggcctcctgagtatctaggactatagatgtgcactaccatgcctggctaatttttattttattttattttttattttcaaatttttctgtagagataagtcttactatgttgcccggactggtctcaaatttctggccccaagaaatcctcctgccttgttatgttttttttctttatcagatatgtgttttgcaaatattttctcccaatctgcagagaaaatatgtggcttgtctttccattctcttaaaccactggatctttcacactacgaccgtttggtgccactaccctgatgcctgctaaaccatcagtgtttgtgtaacatcacactgttgtttgtgtaatatcagtgcaaattgtgtaacgtcacaacaaacacatcattgtttgtgtaacatcagtgcaaattttaatacaaaggaaaggcaaaagacatcttagtattattgtgaaaatagttttaattttgcggacatacgatcaaggcccatggaccatactttgagaactactggcctaaagcaaacaaggatagcctgtactactctttagttcaggcctcagtaagaccaaatagaataagaaatttgaattttacaaatatgtaatgttaatttacttttctgcaaaaagaggtttggaagacacataagatatataattcattgaacttggtgttctaattcattaggaagagcccattttgtttacatattttttgctggtgatttttgagagaatataatttttatttatttattatttatttatttatttatttatttatttattttttgagacggagtctcattctgttgccaggctggagtgcagtggtgtgatctcagctcactgcaacctccaactccctggttcaagcgagtctcctgcctcagcctcctgagtagctgggattacaggcacgcaccaccacgcccaactaatttttgtttttttagtagagacagggtttcaccaggttgctcaggatggtctcaatctcctgacctcgtgatctgcctgcctcccagagtgctgggattacaggcatgagccactgcgcctggcctataatttttatttttaaagaaatactttgtatgtgtatgtgtgtctgtgtgtaaatatatcaagtagagtgtatgggccaatgaatgtctctctcttttttttctggagtgcagtggcataatcatggctcactacagcctcaaactcctgggctcaagtgatacttccacttcagcctcctgagtagctgggatgacaggcgtgcaccaccacacccagctaactttaaaatttttgtagagatagagtctatgttgcccagattggtcttgaactcctgggctcaagcaatcctcctgccgcagcctcctaaagtgctgggattacaggtgtcagccaccgtgcctggccctaaatgtctcttaatggcaaataataggtagataatgcctagtaacgggtttatgatatatttgtctatatagacaaacatatagtaccccaaactttttcctttttctcctagaaagaaaaagcatattttctttccttctggtagatgtacttttccctattccttccattaagtacaacccaaaaccctgaatattatatattaaacaaacatgagaagactctgaaagggggggaagaaaaggagggcagaatgtctatggactgcaggacctgaagaacaacattgcagtgacttactttgtttttatttttgactcatatacaccagacttggagttgaaaaaggtagcaacctggaaatgccaacaggagtagtcgaaaaagcccaaccaaagcctgctgtctttagccaaagaaccatggaagaggcagcctagcaagatagagaagttttaaacatcactatggattgcattgtgtctccccaaaattcatgtcgaagccttaactcccagtgtaattgtatttggagatggggcctttgggagataattagggttagatgaagtaatgagaataaggccctcatgatggaatcagcagctttataagaagaatgatggggttgggtgcagtggctcacatctgtaatcccagcgctttggaaggccgaggtgggaagatcacttgaggtcaggagttcaagaccagcctggccaacatggtgagaccccgtctctaccagaaaatacaaaaattagccgggcatggtggtgcacgtctgtaatcccagctactcgttgggatgaggttgaggcatgagaatcgcttgaacacaggaggtgaaggttacagtgagccaagattgtggcctgctgcactccagcctgggagacagaatgagaccctatcaagaaaaaaaaaaaaagaggagtggagagagatcattctctctgccatgtgaagacacagtaagaagctgatcatctgcaacccagaaagagagcccttgccaggaaccaaattggttagcatcttgaccttagactccctaacttccaaaactgagaaacataaatgtctgttgttgaagccaccagtctatattttgttgtagcagcctgagaagactaatacagacaataactgctctactcagccaaacaccacagcaaacgctttggcccccacccatgccaacaaaggctgagtggggagcctacgattccacccttatgaggctataatgcggcacctcacccaccagggttgtgtcagagaaggccaagtagagagtcaataataagtccactctccacctggcccccatggtatcagtggagaccatgtgggaagcctacacttgcacccccaaaaggcagtaatgaagtgctcctcttcattcctgctcagtggtatcagagtaggactagcggagagtctagacttttaccatcatccaatggtaataaggcaacccccatctcagtgtcagtggagaccacctggggagccagaatgccaacatctgcccagccataatgagaagtgtaactaagatgccaacagaggctgagtgaacctagtcttctacctgcacctgtcagtaatgggttggtgtctttcctcctctgctggagtaatgtcaaaaaaagccagctaaaataaagagttaacgtaaaattaatagccttataaaaatgtccaagtttctttctttctttttttttttttgtgatacggagttttgctattgttgcccaggctggcgcgatctcggctcaccgcaacctccgcctcctgagttcaagtgattctcctaccccagcttcccgagtagctgggattacaggcatgcatcactgtgcctggctaattttttgtatttttagtagagacggggtttctccatggtggtcagggtggtcgcaaactcccgacctcaggtgatacatgcgccttggcttcccaaagtgctggggttacaggtatgcaccaccgtgcctggcccaaaaatgtccaagtttcaactgaaaatcactaatcataccaagagccaggaagttctcaaatgaaatgaagaaaagccaatcaataaatgccaataccaagatgacagagatgttagaattatatgacaaagatgtcaaagcagccattacaaaaatgcttcaaaagcaattctgaacacacttgaaacaaattagaaagtagacagcctcaggaaacaaatataatatataaagatgaaccaaatgaaaattttaaaacttaaacacaataactgaaattaaaaagtcagtggttggacataataccaggatagagagggaacagagaaaaaaatcagtggaaggaagatagaataataaaaagtactcaatcttaacaacaaagtacccaaaggaataatggctgaaaacgtctcaaatttggtaagagacaagaagatgggcaaacctcaaagaagacaaagcccaaataaatctataccaagacacattataatgaaacttctgaaacccagagaccaagagaaaaatcttaaaagcagccaggaaaaaaaaaaaaaaaacacccagggaaaaaacctatttgaatgacagtggatttcttatcagaaaccatgggggccataagtaagtggtacagtgtttttcaagtgctgaaagaaaagaactgtcaatccagaatcctatagttagtaaaaatattcttcagaaatgaagaggaaaccaagatattctcagatgaagaaaaactaaatttttcaccagcagaattactctaaaagaatggctaaaggaagttctctaaacaaatgaaaaaacagaagagggaaatttggagcatcagaaaaggaagtgataaaagaaaacttggagcatcagaaagaatacaataagcaaaaaagggggagagtaaacacaatagtttttccttctattcttcagtttttgttttgttttgttttgttttgagacgctctgtcacccaggctgaagtgcaatggcacaatcttggctcactgcaacctctccctcccgaattcaagcaattccccctgcctcagcctcccaagtagctgggattacaggtgcccaccaccatgccaggctaatttttgttttttttagtagagatggggtttcaccatgttggtcaggctggtctcgaactcctgacctcaagtgatctgcctgcctcggcctcccaaggtgctaggattacaggcgtgagccaccgtgcccaacctattcttcagttttttaaaaatatatttaatagttgaagtaaaaatgacatgttttatatggttctaaaagtatgcagaggaaatattaagacaattgtattataaatagtggagggcaacaggatttaaagggaaacacaatttctatatttcatttaaactggcaaaataatgacactagtagactataatgggttatgtatatataatgtaatacctacagcactacctaaaaagctatacaaagcttttcaaaagttatccaaaatgctgtagataaaatgaaattttaacagaagtatgagtaacccacaggaaagcagaagaaagaaaacagagaaatgaaaaatagaacaaacagaaaggaaaaaataaaatcagagatttaaggcctaacacatcaataattacattaaatgtaagtggtagaagcaggtcaactttaaaagagagagattggcagagtggattttaaaacacaacccaactgtatactgtctatgagaaactcacttcaaatataatgatataggaaggttaaaagcaaaaggatagaaaaatatgtcatgcaaacattaatcaaaagaaagcaagggtggctgtattaatatcagataaagcagacttcagagcaaagaaaatttccagagacagagagagccattatataatgataaaagggtcaatccaccaaaaagacatagcaatcttaaatgtgtatgcaccaaacaacagagctgcaaatcacatgaagtaaaactgatagaactgaaaggagatatacacatatccagttaaaactggagaaagataacaggaaaatcttcaaactaaagaacacacatctaaataacaaaggagtcaaaaaagagatctcaagggaaattaaaaaatacattgaactgggtgaaaataaacataccatgtgtccaaatttgtggaacgcagccaaagtaataccgagaaggaaatatatagcactaaatgcatatgttagaaaagaggaaaagtccaaaatcaatctatgatccccctgtaagaacgtagtaaaagatgagcaaaataaatccaaagtgagaagaaaataataatgaacaaaaatcaatgacattgaacacacacacaaatggaaaaatcaattaaccaaagatctgattttttgaaaagatcaataaaattgacaaacctctagcaagactgacaaagtaggaaagaaagacacaaattgtcaatatcaggaaggaaataggtgaaatcactatagacactgcagacatcaaaaggataataagggaatactacgaacaactctaaatattataaatatgacaatctagatgaaatggaccaattcctggaaaaacacaaagtaccacaactcttcaataggaaatagataatttgagtaaccctacaactaaaaagaaattgaacttataattttaaaactccctaaaaggaaatctccaggcccaagttgtttcactggagatttctaccaaacacttaaagaattactaaaccaattcttgcctgggtgcagtggctcacgcctgtactcccagcactttgagaggctgaggcaggcggatcacttgagcccaggagttcgagaacagcctgcgcaacatggcaaaaccacatctctacaaaatatacatatataaaattagccgggcatggtggcatgagcctgtggtcccagctactcaggaggctgaagcagaagaatcacctgaaccggggaggcaatggttgcagtgagctaaggtcacaccactgcactccaacctgggtaacagagcaagaccctgtctcataattaaaccaattctacattctctctttcagaaaatacaagaggagcgagcacttcccaatattggcaatattttataatgccgatattaccttaataccaaaaccagacaaagacaacacagaaaagaaaactacagaccaaaatcattagtgaatatagatacaaaattccttaataaaatattagcaagtagaattcagctatattgtaaaaaatgtacacactaagactaagcagagtttttttcagggatgcaagcctggttcatcattcaaaaatcagtcagtgacctccactatattaacaggctaaagaagaaagatcacataataatatcaatagattcagaaaaagcatttaacaaaattcaacagttattcatgataaaaactcccagaaaaacaggattagaaagagaccaccttacttgataaagagcatctatatgaaaaaatagaacaaacagaaaacaaaaaataaaatcacagatttaagacctacagatttaagacctacagctaacattttacttaatcatgaaagactgaagctttccccctaaagttgggaacacggaaaggacgctgcttttatcacttttattgaacatagtgctggaagtcctagccagtgcaataaggtaagaaaagaaagtaaatggcatacagtttgggaagaaagaaataaaactatccccatttgcagatgatgtaattgaccacatcgaaaatccagaagaatctgccaaaaaaaaaaaaaaaaacacctcatggaaccaataagtgagatcaacaaggttgcatgacatgagatgaacatatgaaaaaaattatatttctacaaactagcaatgaacacgtggacatctaaattaaaaatgtaatattaacaatcgctcaaaaatatgaaataggtataaatctaacaagacaagtacaggacatttatgctgtaaattatgtaatgtgatgaaaaataacaagatctaaataaagggaataatagtccgtgttggtggattggagactcaacatagtaaagatatcagttctccccaaatagatatagtggtttaatgtaattcccattaaaaactcagcaagatcttttggtagctgtagacaagattattctggaatttatatggaaagtccaaacaaaaagctaaggggcaaaacccgggctgggatagggcatgaggcagtgcgttgggacatcccttgcatcaggctcaacggtgtctgtcactgtgtggctggctgggatgcttggggtgggtcaggggcaggtgtagcctctttgcctcattgtcccctagcaccacaggctgccagcaccatgaagttatggactttggcacacgtctttgaccacctgtgggaaattgttacaacagttgcaatgcagaaatatccaaactctatgagcctgagtgtggttggagttgatgtgttggacagacatatagatccctctggttcccttctcagcacagagagggggctgcttccattgtgaagtctctaattggtgcagcaagaaccaaaacatatgtgcaagaacattctgtagttgatcatgtagagaaaacaatggaacttaaatctactaacatttcatttacaaataaggtttcagtagatgagagacttatagaaaagccacatcctcgggacagaaaaaaaactattttgactcaagaagccataatcactgtgaaaggagtcagcctcagcagttaccttgaaggactgatggcaaggctgagaagcaatggaatgggtaatacacaaattaaatgctgagattgaagaactgttggcctctgcaagaggaagcatagggactccgatggcagcagcagagcatttgcagagaaataatcatgaaagttgttagacaacgtcagttaccccaggtctctccaagctaactatatatttatttgttattttaaaaatagaactatcttttaggtagaatttttttaaaatatgctgatgtaaggctatgtgacttttgatcaaaacaaagagatgcagggcttctaaataaaagtgatcattagaaatttttaaaaagaaaagctaaaacaattttgaataagaagagtaatgggggagtaatcagtctacccaatttcaaggcttactctgaagctacagtaatcaagactgtgtagtgctggcgaagagagagacacattagacacatatattaatgtaatagattaaagaatctagaaatagacccctacagatatgtccagtggatttttgaccaagatgtaagaacagttcaatacaggaaagatagacttttcaacaaatggtgttggagcaactggatattcataggagaaaaaaaaaaaaggaacttggcctaactcacacaccttatacaaaaattaactcaaaagattgtgaacttaaatgggaaatgtaaaactataagattgtttagaaaaaataggagaaaatatttggaatctaagcttatgcaaagagattttagatttgacccacaaacgggatccagaagaggaaaaattgatatacttgatgtcatcaaaataaaaaaatttgctctgaaaagacctcattaagaggataaaagctccctattcaataaatggtgctgggataactggctagccataggcagaagattgaagctgaaccccttctttataccatgtacaaaaatcaaagtctttaatccaactttaagatgaattaaagacttaaatgtaaaacccaaaattataaaaaccctggaagactacctaggcaataccatcctggacataggaactggcaaagatttcatgacaaagacatcaaaagcaatcacaacaaacgcagaacttgacaaataggatctaattaaacttaacagcttctgcacagcaaaagaaactatcaacagagttaacagacaacctacagaatgggataagatatttgcaatccatgcatctgacaaaggtccaatatccagcatctataaggaatttaaacaaatttacaagaataaaacaacctcattaaaaagtgggcaaaggatatgaacagacaatgttcaaaagaagacatacctgcagccaacaagcatatgaaaaaagctcaatatcgctgatcgttagagaaatgcaaatcaaaaccaaaatgagataccatcttacaccagtcagaatggctattattaaaaagtcaaaaagtaacagatgctggtgaggttggaaagaaaagggaacacttatacactgttggtgagagtgttcaaccattgtgtaaagcagtatggcaattccttaaagagctaaaagcagaactaccattcaactcaacaatcccattactgggcatatatccagagaaatataaatcattctaccataaagacacatgtgaggccaggcgcggtggcttacacctgtgatcctagcactttgggaggccgaggcgggcagatcacgaggtcaagagatcgagaccatcctggctaacacggtgaaaccccatctctactaaaaatacaaaaaattagccgggcgtggtggtgggcgcctgtagtcccagctactcggggcagaagaatggcgtgaacccgggaggcagaggttgcagtgagccgagatcgcaccactgtgctccagcctgggccacagagtgagactccgtctcaaaaaaaaagaaaaaaaaaaaagacacatgcgtatatgttcattgcggcactattcaaaatagcaaatacatggaatcaacctaaatgcccatcaatgacagattggatacagcaaatgtgatacatatacaccatggaatactataccaccataaaaaagaacgaaatcatgtcttttgcgggaacgtggatggggctgggtgctattatcctcagcaaactaatgcaggaacggaaaaccaaatatcgcatgttctcgcgtataagttggggagctaaatgatgaaaacttatgaacacaaagatgggaacaacagatactggggcctacttgatggtgaagggtggagggtgggaggaggggggaggagcagaaaaatcactatgggtactaggcttaatacctgggtgacaaaataatcagtacaacaagcctctgtgacataagtttacctatataaccaacctgcacgtgtacccccaaacctaacataaaagttttttttaaagaggataaaaagacaagttatgtgcaaatttctgtagagaaaatatttgtaagctacatatctgacaaaggactagtactggaatatataaagaactctcaaaactcaacagtcaaaaaagcaaaaatccaattagaaggtagagaaaagacatgaagaagataatacagatggcaaataaacacatgaaaagatgtttaatatcattagccattagggaaatgcaaattaaggccacaatgagataccactacatgcccatcagagtagctaaaatgcaaaacagtgaaaacaccagatgctagcaaggacactggatcactcatacattgctggtggaaatgtaaaatggtacagccactctggaaaacagtttgccaatttctttaaaaattaaacatgcaggctgggcacggtggctcacgcttgtaatcccagcactttgggaggctgaggcaggtggatcacctgagaggtcaggagttcaagaccagcctggccaacatggtaaaaccccgtctctactaaaaatacaaaaaaaattagccgggtgtggtggcagatgcctgtaatcccggctactcgggaggctgaggcaggagaatcccttgaacccaggaggagaggttgcagtgagctgagattgcgccactgcactccagcctgggcaacaaggcgagactccatctcaaattaaaaaaaaaaaaagaaaaaaaattaaacatgcagccaagcacagtggctcacgcctgtaatcccagcagcttgggaggctgaggttggtggatcacttgaggtcaggagttcaagaccagcctggccaacacagtgaaaccccatcgctactaaaaatacaaaaattagccgggtatggtggtacatgcctgtaatcccagctaccccagaggctgaggcaggagaatcgcttgaaccgggaaggtggagtttgcagtgagctaagattgcgccactgcactccagcctgggcgacagggggagactccatctccaaaaaaaaaaaaaaaaaaaaaaaaaaaaaaattaaacatgcaactaccatacaatccagcaatcacactcttggacatttatttccccaaaatgaagactatattcacacaaaaacatgtacatgaatactaaccctacttgtattcattatagtaaaaactagacacccagatgtccttcagtaggtgaacagtgaaacaaacgatggtccatctggaatacttctgagcaataaaaaggaacaaacgattgataaacacaaccacccctggatgactcttgagagaattatgctgagtgaataataaagtcaattgcagaagtctatatactgtatagttttatttacatgacattcctgaaatgacaaaattatagaaatagactcatggttgccaggggttaaggagtggggaatgggagggaagtagacacggtcataagagggtaacatgggggatccttacggtgatagaaatgtatcctttgagtccagatttcagctggtctgcagcaaggactctcccagcggtagggaggctcactcaaaaagtcatggcccagggccgggtgtggtggcgcacacctgtaatcccagcacttagggaggccaaggcaggcagatcacaaggtcagaagtttgagaccagcctggccaacatggtgaaacctcgtctctactaaaaatacaaaaaaattagctgggcgtggtggcgggtgcctgtagtcccagctactggggaggctgaggcaggagaatggcgtgaacctgggaggcggagcttgcagtgagccgagatcgcgccactgcactccagcctgggcaacagaggagactcagcctcaaaaaaaaaaaaaaaaaaaaaggcatggacctaacaccgtagatgatgggggcggctgttatacaggcttcatctgagtgttctgtggctcccacatccagcctggtatgaaattttggcaacgttaacaaaacaacaacaaacaatctatgtcttagagatactgaagaatatacaggtgggacagctgatgagaaatgctggattccatgctaaggagtttggtttgtattttgcaggcaaagggcatctattgaaggattctaagtagaaatagttacaagatcagatttgtaattttgaaaggtcattgggttttgtcccagtggcgtccttaatagcaaaagaaagtcctgaatcgcgggtcgtgctctgttgtcacttctccctttaatctgaaatgcttcctcagtgttttcgtcgtccttcatgaacttgacatttttaagggtctggctggttattttgaagaatgttcctcgatttgggttggtctgaggtttcttcacgatcagattccgcttatgccttctgacacaaataccgagaaataatgcggtgtccttccccacacatcatatcggatgacagcttccattcattgtggcatttagatcactcagttaagttggtgacttgtcaaatacctttattgcaaagtaattatttttctctttgcaattataaattcattatcttccttgtggagcgatattttgagacaattgtaaatatcccgttactcctcaaatttttaccctctagttttaggaagactttatgattcttgcctgaatcatttaatactatcatggttgccaagttggcaattttctacatctgtcattccttctatatttatcagctggctttcttctgtaaagcagaactttcccttctcccccacttatttacttaaatatgcacagagagagagagagtggcggcggggggacatgtattctcattttattcaatgaatcccttgactttccatcattctgcatcgtgttattatgttttaggtgtttctcttacaaacaacatatagataaattttttccagattgactttttttctttttctttttttttttttttttagacagggtcttactctgtcacccaggctggagtgcagtggcgtgatttcggctcattgcaacctccgcctcctgacctcaagtgatcctcccatctcggcctcccaaagtgctgggattacaggtgtgagccactgcacccagcctcagattgactttctaatcttaaaacagtaagtttttcatgtatatgtgttgtgaaaataatatatatggattttttatgcaaaaaagtagatttacatatgttcaagtagaaaaatatctaaaatgtgatcttaaggggaaaagttgcaggaaagtgtgtgtaaaataagcccatccatgaggggaaaaggatatgtgtacctctactttcatagtcataaaaatttctggaaggtcacacaagaagtgggttaacattggttactctaagaaggtggctggggggtagaggtctatttctagctttgtatattactggaactttaacatctgtgaacaggttttacttagacaattcaaacgcctgatgtttgcctgctcacagcctttgacagatacagacacttgcacggccatgtggtacccgaggctgttagagttaattccaggctggatgccacataagcaggtgagatgcggggccaggggaggcccctgacagaggaggacatctgagtgaagttccaaagtgaggtgtctcagcttcgtggaaagcatgtaagcactgatgttaggcaagcccaaatttgaggctagctactcactccctctgtgaacttgggcaaacttatgagcttctgcaagtcctacgggattgctgggaggattagaactgatcatatctgtggctgggcatgatggttcacgcctgtaatcccaacacttcgggaggcagaggctggtggattacccaaggtcgggagtttgagaccagcctggccaacatgatgaaaccccatcactactaaaaatacaaaaattagccaggcgtggtcgtgggcgcctgtaatcccagttactggggaggccgaggcaggagaattgcttgaacccaggaggtgaaggttgcacagagccaagattacatcactgcattccagcctcggtgacagagcgagactctgtctcaaaaaaaaaaaaaaccaaaaaacaaaaagatagtatctgtgaagggcactgaagaagtactggtgtaaacatctaatatatttttgaaagatgaggaggtggcaacaaaaagaagaagggggtccaagaagggaacagcacgtagtgtgctgggcccgagctgtgggtgttggcctggggcaagtgtagagagacacaaggacagcttatgacaagcattaaatcccacgctaagaagtttggttgtattttgaaggcaaagggcatctactgaaggattttaagtagaagttgttacaaggtcagatttgtaattttgataggttatgggccgcaaattgagggccagggtggagggttaaaagtgaaattaggtaagccaattagaaaattgtagtaatctggaaggcagatgaagacgacctgaactaaagcatttagctatgaaggacgtggaaaccattaagacctaacacctgttggatgcaacagtcaaggggaaagaaggaaaaaaccagagaacttttgtctgaagcaactgtgtgtatggtggtgagtgcagatagacagatagaggaatggatcaggaggaaagaagagtccagtttcaggtatattgagtttaatgtgtctttggggtttttcattttttgtttttttgagacagagtttcgctcgttgcccaggctggagtgcatggcgtgatctcggctcattgcaacctctgccttctggtttcaagtgattctcctgcctcagcctccagagtagctgggattacaggcgcccaccaccatgcccagctattttttttttctttgagatggagtcttgctctgtcccccaggctgaagtgcagtggcgcgatctcggctcactgcaacctctgcctcccaagcgattctcttggttcaagcgattctcttgcctcttggttcaagcgattctcttgcctcagcctcccaagtagctgagactacaggcaagtgccaccacgcccggctaattttttgtatttttagtagagatggggtttcaccatgttagccaggattgtcttgatctcctgacctcgtgatccacctgtcttggcctcccaaagttctgggattacaggcatgagccatcacgcctggtcccagctaatttttgtgtttttagtagagatgggatttcaccatgttggccaggctggtctcgaactcctgaccttgtgatccacccgtctcggcctcccaaagtgttgggatgacaagcatgagccactgcacccggcccaattttttttttttgtttttagagacagtcttgctctgttgcgcaggctggagtgcagtggcaagatcatagctcactgcagcctcgaactccctggctcaagcaattcttttgcctcagcctccccagtagctgggactacaggtgtgctctaccaagtgcagctaatttttttatttttgtagacacagggtttcactatgttgcccaggctggtctcgaactcctggcctcaagcaatcttcctgcctcggccttcccaaaatgctaggattacaggcatgagctactatgcctggccttaagtctttgaatcctataactggtgatgtggtaagctgctagatctgtgaggcttgtacttaaagggaaaagcctgtgctggcattaaacactactttgttagtgcttgagaggatggatggccagaaaggccgtggttattttgggtaatggtcaagcatgccagggttaagacacctggtagatgactaagtcttaagattctaaatagaaggctgatcgcaagtgtcagtgtcagcaacaatcaagacataagggtgtgttagaagcttcaggatgacaccaggagggctttgctcagagttaggaacacaaaaatgaccagattttttttttttttttgagatggagtcttgctctgttgcccaggctggagtgcagtggcgcaatctcagctcactgcaatctccgcctcccaggttcaagagattctccccgctcagcctcctaagtagctgggattacaggtacacaccaccacgcccagctaatttttctatttttagtagagacagggtttcaacatgttggccaggctggtctcgaattcctggcctcaagcgatcctggtgcttggcctccccaagtgctgggattaccggcatgagccaccacacctggccagtagccagatgattttgaatgtctccagcaaaagcctgaattgtttgtgctttcaaggggaactagtaacatgacagcaggcagatcacaaggtcaagagattgagaccatcctggccaacatagtgaaaccctgtctccactaaaaatacaaaaattatctgggcatggtggcacgcacctgtagtcccagctactcgggaggctgaggcaggagaatcgcttgaacccgggaggcggaggttgcagtgagctgagatcgcgccactgcactccagcctggcgacagagcgagactctgtctcaaaaaaaaaaaaaaaaaaaaaaaaaaaaaattcaagaagccagacttttccttttcaataggcaccgagctctatgtcactaatggggcaaatggggctcttttctgtggacgaatggatgccttcccatggtttccaacctgggtccctagaggagaggattcctcatcatccatggatcctctcagattgctcagttgcatgatattagatgcatgtgtgcattttctggggcgaaaggcccccaaatcatgaccgcagccactgatccttttctttctctttctttttccaccttcctatttcccgttttttcttctttcttgcctgtatgccttgtgtttaataagccatgggaggaatttgcttactccactgtctcgccctgatcatcccacatatggctaaagtgactgctgactcctggtctagaatggtgctttccaatctttaaaaatgcatgtataatagaacttcctctgacctgtttgttttatgaaagaaaattttgaatggatctttatagaaaaccaacttaacaaaataaaaggagcagttatgtatgcagagggggaagtctgggccccacccaccaggccattccacggaccctgagggacccccagagttctgtggaatcccaggtttgaaaactactggtctaaagccaggtgttggggcagaaatccagagagtaattccagagagttccccaagggaggagcacccaagtcctcgaggagccacatggttagtatatttctgacctgcgaggtttaaaagcctatcctgacggggcagcttgaggggctctggctagccttgtcagttatagaatgtgggtgaacccgatgttgcaagcccaatgttttcatcagtttgatcacctctattcatgcctatacactccaggttgtaatgaaacttctgtccaaggtggccatttgtgaatgatctagagtagaagagtttgtagggctacctgcaaatcatctctagggctgaaaaaaaccaaaaaacaaaaactcaatttaaactgcagaacagtgtatatgaaaagatcccttttcatattcatgcatcttcaaatggctactggatatttgagaaatgattatgaaattatgtcaaataaagtcattagtccctgttctagcttaattcctttttgactgtccataatgagtacatgggtatccattgccttcttcatcttcttcttgggacaaagaaggggccatctagacagtatgtcatctgtagtcttgaagattttaaagtaatggtggtggctgggtgcggtggctcatgactgtaatcccggcactttgggaggctgagtctaggggatcacttgaggtcaggagttcgagaccagcctggccaacatggtaaaacctgtctctactaaaaatacaaaaattagccgggtgtgatggcacgtgcctgtaatcccagctactgaggaggctgaggcaggagaatcgctttaacctgggaggtagaggctgcagtgagctgagattgtgccactgcactccagcctggaggacagagttggactgtatctcaaaaaaataaaaataaaaataaagtagttgtggctactccgactaagagcagaagtgcccaatgcttcaaggcaccatgaagacatgcggcctgaccccttccttccctggcccttggagaggctaactaacctatccagttgctaacagacaggttcttttgggtaacttggatgtttccattctcttgaggtttggtgcccagcttgcaggcctagttcccactcttctccatctagtttttggatagattctcttacatagcttggctaagattattcaaccttctgggctcaactcttctgaagctacactcatttgaggtctcactcccccataagagtgccattccttcttctactgagggcttttatcacctgcccggacttggattggacttgttccatctagttccctgccactcctctcacccctgcttcctccctgccacctggctgcaattcctgagtgggatacccttattcccaggtaggaacataaactccagaaacagtcacttcgacaggccatgcctttatttaggtgaggatatcattgcccaataatttcttcacaactcttctcttagatcctgtatcacattatattttgattatcttcagtatctatatgtcagggattgactgtttttaaatggccagacattgttcagggaagggctcagtgattaaggctgtgatcaaacacaacaccactattcgtgtcactaaagtaataaaatggattttcttttgtaatttgcaaactgggctccaaaagaaattccactagactgtaagcatgagggcaggggctgtgtttgttctgctcatcactttatgctcagcaccaaaaagagaagttgaaaagttgtaagtgcttgaccgatgtttgttgagtgaatgagtagaaggatttcaaagaatgtctggagcagaaacagtatcattcagacaagcagatgacctggtaatatccaccatctaaaagttattggtgaaaccccgtctctactaaaaatagaaaaattagccaggcatggtggcgtgcacctgtagtcctagctactcaggaggctgaggcaggagaattgcttgaacctgggaggcagaggttgcagtgagccaagattgcaccactgcactccagcctgggccacagagcaagactctgtctcaaaatacataaataaataaaagttcttgtattcgtccattttcacactgctgtaagaactgcctgagactgggtaatttattaaaaaaaaaaaaaaaggtttaattggttcacaattccagatggctgcggaggccccaggaaacttacagtcatagcagaaggcaaaggggacgcaaggcactttcttcacaaggtggcaggaagtagaagcgccgagcgaagggagaagagccccttgtaaaaccattagttctcatgagaacccactcactaccatgagaagagcatggggaaccagcccccatgattcaattacctccacctggtcttcccctcaacacaggatgatggggattataaggattacaattcaagatgcaattttgggtggggacatagctgaaccatatcagttctttaacccactggcttagcacagaagtcatgatacctgttcttctttgatacggtttggatttgtgtccccacccaaatctcatgtcaaattggaggaggggcagaattcccccttgctgttctcgtgatagtgagtgagttctcatgaaatctgatggtttaagtcttccccctttgctcgctcgctctcctgcccaccctgtaaagaaggtgcttgcttctccttcgccttccactacgattgtaagtttcctgaggccctccagtcaagcttcctgttaagcctgcagaactgtgagtcaattcaacctcttcataaattacgcagtctcaggtcattctttatagcagtatgagaatggattaatacattcctgctttattccttatgctcatgtgaaaatatactgcaagttgcaatccctaagagttagtaacaattaaatcagaaatgcaaacctcaggatcatctacatattggagccatgtgtgccgatgttgctccagagggaccctctgcagaggctgttggtcagttccaaacgtctcagtctttccattataagtcattattaccagaaaatttaaaaaatgttttcaagtacagttcagcgctttagatagatttgtttttctcttcatgtggtagaatcacatctggacatcagttagatatatttcatctaaaaatagcatttatccaatttactgtcactggaggaggttttttttttaaggcagactctgcttataattctctgtagtctttcatggctcactgccatttaatataaaaaaaagaaggcatcagattgattgtacgtgtaagtgtgtgtatggaagcacaatgaaacaataagtttcatagactgaaaaaaaagacaactgccttatcattccccttttattcatttatttttttgagctgtcactggttacgtcgttaaaccttaaattcagaatcagtgtgaactccaccagattctttttagtaattacttcagggccacaaaacatgaatttggggattttttttttttggtctgttttatttgagactggattctttttacttatttagtgtgccttctcagcaacctgctatttgggtttagaaagaaaggaggagagctgtgcgtggtggctcatgcctgtaatcccagcactttgggaggccaaagcaggaggaccacttgatggagtttgggccagctacttgggaggctgaggctggaagattacttgaacccaggaggcagaggttacagtgagctgagatggtgccactgcattccagtctgggtgacagagacagagcgagactccatctcaaaaaaaaaaaaaaggagacaaattaaaaggagtcaggaagaagagagaaaggaaaaaagagtagagggttaaagcgcaggctcatggaagcccatggagcaggtggcacacatttagaagccgaaattggaattaaatctgactaaagaaaaatcagcaagctgctgcttctacctaaggcgctgacatgaatctgagttggctctgaaagggacagattataaataaggaagcacttaacagtctattccaactgcacatttatcaaggtcctccttcgttctggagacatttatcttcagggacaggactctgaccctccttgccttgtggcactgggtctgtctcctggaagagaactttgtcttttgagctgtggtgtttgccctttttctctgaaggcacgtcctcccccaacttcccccatgtgatggggataaattctgttttcaaaatacctttcaagcagagttaatgggtctgacctgtcgtgattataatgtattgccccctgcttgtcaaagtggcgttcctggtcctcagttagtacagcctgggcttggagaccctttccatgctttggggaaggatttacctgactgcctccacatcctctccccttctcctttgtggcctttgatagaaatgtttaaaatggcagagaggctgggctcagtgactcacgcctgtaatcccaacactttgggaggccaaggcaggcggatcatttgaggtcaggagttcaagaccagcctggccaacatggtgaaacgctgtctctactaaaactacaaaaatcacctacctgggtatggtggcagatgcctgtaaaccagctactcaggaggctgaggtgcaagaatcgcttgaactcgggaggcagaggttgcagtgagctgagattgccccactgcactccagccttggtgacagagtgagactctgtctcaaaaaaataaaaataataaagtaaaatggcagagaggtgttagggctagagcctgagccgtgatgtggagcaacaacggctgagttgtacagcaggtcagtccaggaccttcgtatcatcactaccaggctttaaacaagtgtgctaatatctgatctgcccacggggatgagcttaaacacacccactcagaaaactctcttcagatccattaacagaggggcctttcaattcctaagcatatccagcctgtaaaaagttttgcaatattcaaccctgagattggacctgttgaacccttttcattttgtgaactatttttgtagatttttttgacacatctcggcacaaatgaaacaacagacaatgttttaagaggagtctctcattcgacttcagttatttgcaaccttcatttttcacctttaaaaatttaacagatatgtgagtggaataaaattaatttccaccacccacaatagttcattagtgaaataaggaaagtatttaatggatttgtgcttggtgtgcctaaaattatttcaccataacaaaaggtcttgaaagactaagaaaaagtctgatgacaattaaattgcctatctgaacaggagtactgtacagcaggaaaacatagtcttaaaatagctcattgtagagctggaaaagagagggagaaatacataaaggaagcacaaaggtgttgcatatgaaatgaaaatcttttttaaaaaataccaacacagtacttgttctttgcttgtgcagagtcccagattttcacaatctttcatgcttccatttcatttctgtgggggcgtgacttgtttcagttagaatcctaagcaaactccatttctctgctttaaaaggtaaaacttcattcttcccagatgtacagtaaagctttggaggcttcacgttttgaaacctactgattaagaatttgacattttctgcgaaaaaatgcccagtagggcacaaagacagcaggagggaaggttcagcaaacaaaatttccccccgcccttttcatacagcaccttctatataacatcaggggtagaagagactgtagcagtgatctcatccatagcctcttttacagttgaagaaaatgaagtacagagagggtgaatggtttgtccaagggcacacagccagttagtggccaaagaagacaatcctatctgggtctttcctgaactatagcacccaaataccagttcttttctttttttaaattatgtatttatttatttattttgagacagagtctcactctgttgcccaggctggagtgcagtgagcaacctccacctcctgggtttaagcaattctcccaagtagctgggattacaggtgcacgccatcacacccagctaatttttgtatttttagtagagacaggtttttgccatgttggccaagctggtctcaaacccctgacctcaagtgattcacctgccttggactcccaaaatgctgggattacaggcgtgagacaccgtgcctggccctgaacaccaattcttgcttatttatttgataaatgcttgccagggagggcttcagcacaaatccatttcatagcttcgtctttattaatgcactcgttgaaagcaatgcatttttttgtgatgtcctctaatgcagcatgatcaggaagaatgcttcagttccatgccctctgctcctcccgagcccagcttagtacaatttgaagatgacctgcaggtcccactgcaaggcagcaggttgcccacagcctttggtttgttaggtcaaggaatgggtgagtctggcatgtggccctccccagggtagggatgttctggaatcttctgggtcccaggaggctcatttgtctaagtcttaactctttctgctctttttgactctgcgaggaaaacgcaagaaatgaaacccgaatttcttttttattatctggtaacattttgccaaaataattgtttttttgttttctggttttcaatctggttgtgtttttattttcttaactttaaaaaataaggttttgggctgggcgcagtggctcacacctgtaatcctagcactttgggaggctgaggcaagtggatcacagagttggagaccagcctggccaacttggtaaaacctcgtctctactaataagacaaaaattagctgggtatggtggcgcgtacccgtagtcccagctactcgggaggctgaggcaggggaattgcttgaatctgggaagcggaggttgcagtgagccgagatcacaccactgcactccagcctggtgacagagcgagactccatctcgaaggaaaaaataaataaataaataaataaataaataaaataaccattatggctagccctaaccccaggggatcttataaagtggctggtatttagtctcttctttctgtctgtgttttccctccttctgtcatcaagcaactcacccagatgcagaggaaggttaacagggctggaagtagggtgaggccagtgagcacacaacttaaggggactccaaaagttcagtactgcagaccaaaaatattcaggaaaaaacccaataagaacaaataatacaaataaggccaggcacagtggctcacacctgtaatcccaacactttgggagatcgaggcaggcagatcacctgaggtcaggaagtcaagaccagcctggccaacatggtgaagccctgtctctactaaaaatacaaaaattagccaggcatggtcgcaggcacctgtaatctcagctactcaggaaactggggcaggagaattccttgaacctaggaggcagaggttgcagtgagctgagattgcgccattgtactctagcctgggtgacaagagcgagactccatctaaaaaaaaaaaaaaaataagaaagcagtacagtatagcaactatttacatagcatttacatcatattagatactttagtgacctaaggatgatttaaagtacatgagagggcgtgcataggttatatgtgagtactataccattttacagaatagacttgagcgtatgtggattttggtatctgtgaggggtcgtgaaactaatgcctgctggatactgaggggcaactgtatagtcacatggagggtgttgcattttaggccaaggaaacagcatgaataaattgatgggggcccttatacatttcctctttgagtatcatcaagtactttggtgctgccagagttcaggggagtgtaatactcagattttttatggttgcaagtaacaggaaatttgactcagaattgcttggcataagaggttagcaaactttttctgtaaagtgccagatagtacatattttatgctttgcaagccgcatagtggccagagataggggagttttcttcggtaattcaatgtcaacaaggaccttgtgttccagctcgccacactgtatttcataatgttggcagccagcatatccagggacttcagggtctttttctatgtctggagattaagaggaacattttaatgaaatattttaaaaatctgagttaatgcaaaaaaaaaaaaaacccacgatgaacaaaatgtgaacattttaaataaagagaggactcgcattactaattttttcttttggcctcaggttccaatatggcttggtatggcactgagagttaatggccagaaatacagtggaatatggcgtgtgtgtgtgtgtgtgtgtgtgtgtgtgtgtgtgtgtgtagagggaaagagatgaaccacaaagccagaagaaatcttaatcacagaagcttagttcaatcaattttacaggtgcagagctgagaaattaagtgttttcccatgaatcaatcacagagatctttaaaaagattaaagctcagatctcttgaccacaaatcccgtggatacttacacagcagaggcttctaagacagaggaaactcacatctctccagaagaggcaagcccaatgatttgatccaaatcagggcatattctagcgccactctacatagagatagaggggtttttgtgtgtttgtttgtttttttgtgatggagtttcgctcttgttgcccaggctggagtgcaatggcgtggtctcggctcactgtaacctccacctcccaggttcaagcgattctcctgcttcagcttcctaagtagctgggattacaggcatgtgccaccacacctggctaattttgtatttttagtagagatggggtttcaccatgttggccaggctagtctcgaactcctgacctcaggtgatccacccacctcggcctcccaaagtgctgggattacaggcatgagccactgcgcctggccaagatagaggttttaaaacagttaagggtcccagagcacatgcatgatctctctttagatactgtgccactaaggattccagaaaaataaaacatggcccagagatgcagccacagcctctttttggatgccagcggttcctgttcctcctcactccttcccatccaagtttaggggagcaaagactatcctatgtgcacacgacagttctgaacacagcaaaagttctgaataaggcaaaggacagctgcagcctgctgttccaggtctcactttttctttgtccccttataggcttttgcaaagctgtaggtcccatggagggtgggtaactggtttacaaggtccagggatctgttctaggtcgtaggatcaactcatctcagtttgcttggggctttcctacttttagcactgaaaatctcaagtcccaggaaaccttcagtcccaggcacactgtcacagctggtcagaatcactttaggtgcttgaacccaggaggcagaggttgcagtgagccgagatcgcaccactgcactccggcctgggtgacagagtgagattcagtctcacacacacaaaaaatcactgtagagaccagcatccacattgggaccccactgtgagttccagagtcattgtggaggtggggtgttgaccttttctcaagaatagggtagaactccagcgtgtggagtaaaggagtggatgaacttgtttttcaagctgggggataggaacttctggtaaaacctgtccttcagcctctgataagaatcagaatcttttggccagggtctgtaggctgaaggcaataagggtttatcactacccccatggcaccggggctgcaggccagaggtatctggtgaggacctttgggtgacaggaaagcattgacactgataacaggcagactagaaaatgctgagattcaatccctgccactcctggaatcagggcagagggaatgggggcagaaacttttgtatccaaatctacctccagggactgggtttctaggacaacactccctcccatgcggccagccatggagcatctccccagtcacctggctcagcctccctcccaagacagggctgctggaggaagtgctaaagacatgagatcctgtcaacacctgggtggtgtggggcagtctcccacctggattttgagaggtggctgtggacaggaaggcaagagtgggaatgaaaggttggaaagtccatcagagttaccttccccctctggtgtgtgcgcacgcacgtgcacacacacacacacacacacacacacgtacatgcacatttatgtacattccaccctgattaaagcattgtgaactcttatgagaggaaacagaaatgtgaagtcctgactgagtccacaagtgaaatcttagtgagtaagtgtctgagcaggaaaaggagtccaggtgcccattagttccggcaaattcccacagttcaggatctccctgaacaatttccactgggctaggacagtcagggtgttgtgaagatatattcagcttctagtaataacttccaacatactggagagaacaaagactggagaggttccaaagagatcacctgctacagaaggatctgacgaggctgtaaggttatggaatgggtaggaggaaaggttaggacttagatagaaggagactggggggatgtggaagaggagggagtcaagggttccattcagagaggtgggaaaggttcaagaacagcctgctttgacatagataatagtctttattgctttacggttactgatgtatatgtctattatgtctaattcgtcttccacccatcccctccactttcaatttacaagctccatgaagacagggctgtgtcttattcaactgtgtatctatgttaagtgcttagcagagtgcctttaacatcatacaggctgggcgtggtggctcacacctataatcccagtgctctgggaagtcaagtggggaggatcatctgagttcaggagttcaagaccagcctagttaacacagcgagaccacatctctacaaaaaatttttttaattagctgggcatagtggcatgtacctgtagtcccagctacttgggaactgaaggaggagaattgctggagcccaggaggttgaggctgcagtgagtcatgatcacacctctgcaactccagcctggcaacagaatgagactttgtctttgaaaaacaaaacaaaacaaaaatcatacatatatgtgtgaatatgtataaatcatacatatatgtatacatatataaacatatattaaaatatatatacacatatgtgtatatatatgtgtgtgtatatatagatagatagatagatacacgtgtgtgtatctatatatatatatatatatatatatatatatatatatatatatatatttttttttttttttttttttttttttttagatggagtctcactctgttgcccaggctggggtgcagtggcgcaatctcagctcactgtgacctctgcctcctgggttcaagtgattctcatgcctcagcctcccaagtagctgggattacaggcacctgccaccacacctggctaatttgtgtgcttttagtagagatggggtttcaccatattggccaggctggtcttgaactcctggtctcaagtgatccacctgccttggcctcccaaagtgctgggattacaggtgtgagccaccacggctggccaaaagtcatgcatattgaagaaacatttctgacaaaaattgaagtggaatttcagaatgagtttattaaagtttaagacatatatcttgggacgaagaatgtctaccacaaatgtaaaaataagcctggtgaaacaaactgatgtccatatccaagcccccaaaatacaattatgaattatttctgttaaagcttaagtataaaaagtcacccagactttttcatcaagatcttcattgagaccatgcacatcctgtcaaccaatacaactttgtctttttgaaaatagtccataattccatgtaaaccagaatgaccaattcaggtaaatcagaagggcttggtatttgcaacctctgtgtattatgcaggttggttctatgtcagggacagcaaatgcctagcaccagtgagctgctgactgcttgctgaagccattgtgatgacatgtcatgactcctcaggttatgcatctcttccatttctctttgattcctattattgtacttctttccccaccttctattcctcttctatattttcctctttgtcttcctgtatcaaagaatctaatcattgcccatgcatgcacacccttctaggtgtttctgtctcttttctctaccacatccctccccaagagtgacagctgctggttcccactcttcctgaggcctgatcgctcagcttttccttggagtccatgaggttccttggagtccaccgtcctcctcatactttaatttgtctaagtagatttctgttcttgcaaccaaagttaccccaagccctttccttctggcctctgctgtaggataggcctgccagtggcacctggaggaactgctcagccaggacgtcaaagggctatcacccagcctgcatgctatgaagcatcagaatatctggaaatgggtggatgttggttgaattttctattttttagtggaatgtttcagcatcttttggacaaggctctctggctagcttaagcaccttgttaagaccattaaatgaattttgtggtgcaagacaaggaagattcacgttaatattgccactaagccctacctatatgggaggcttagctggatataggtgatcagggatttctttctctctctctttctttctttttaaagaatggaaaacattaaaattgggaaataaagtggactttagactttatctccctaaaaggaatggctgtagaacagcaaaaccttcttctatttccagaagggaattgtggcaagagaatagaagctttacggggaattactggtattatcaaaggcttttcaaaatagacttgaaatgaatagttgtgtgctggttttattactgctttgcgagtttacattttgtttttgtatggtatttttctctcctctatgagatggttgctaaggcatgagagcaaataacctttattgtgttgaatttgggaccgaacgcaattatcttataatttgggttcatagtgtcatttttgacagttatattatgagctttttggggaaaattgagcccacatgctgtaagctgcttcctcttcagttgcccttcaagttacaacatctatgctcctctatcccccattcatttgcacttgggcagccttggggccagatgctgcttggaggcaaaccagacgatccactgtgggcactaccaagccacagcattgtctgctctgaagaggccctgtcccctgtcatatgttatttccaggtgactacatggacatgggtctcaagggatgctgcaaatggttattactaaaggtatgttgcattgctcacaacaaagggaagtcataagtcaacagaatttttgtacatcaagccaatgttcttagtagccttcgtgactatttcggagatgttttatcttccttccttcctttctttctttctttctttctttctttctttctttctttctttctttctttctttctttctttctttcttttttttttgagacagagtctcgctctgtcacccaggctggagtgcagtggtgcgatctcggctcgctgcaaactctgcctcctgggttcaccccattctccctgcctcagcctcctgagtagctgggactacaggcgcctgccaccccacccggctaattttttgtatttttagtagagacagggtttcatggtgttagccgagatggtctcgatctcctgacctcatgatctgcccaccccggcctcccaaagtgctgggattacaggcatgagccaccgtgcccagctgttttatcttcatttctgactggcctttagttggcagcacttcttacctaatctatcccgtagcatttttgtaaaggaaggtaatgagctataaataaattttgaaatgtaccatgggaacacattgcttacagaaatccttctttaaataacaattattttctctgttccttcccattgccctagtagaagtttgagttcccccatagcacaccctgagataagagtttaagtgcaaatggtttactcgggagtaatgtcaggaaacaccagtgggatgtgaggaagtggtacagggaagggaaggacatcaataagagatacaacatcaaataggttactactgtgggtaagtggggctaaatcctgccaaggatccctgggaggcagcatagaagacacacctcagagttataccacctaagggcgagggagctggggtatttatataccaactccttcagtcattagtcaagggctgctcaggggtgggagtgagttgccatttcccagcacttctgccttctacatgggcagggactaccaaaacccaagaaagctctcaggcagagatgttaagtgctgatagttggaagccaagccagtgtatgctgaaatgtagaggctgggaggctgtggccaggacacccaacatctgctacccttagctccccggagcatgtgagaagtcaactctccattgctcccgagaatcaccaccagcattttattgtgcttaagacacacattgtcttctatgtgcattttctgcaaacctaaaaagggttgtaaagacttattagaaaagtgaagtgttttccctcaaaatatttctttatgtagaaatatgaggaaatggagccagtgaccacaataaatagattaataaaaatccttttcaaaatgtccccacccatcattttcagtggatagaggatatagatgctaacatgtacagcctttattttcaatatggtctttaaaccaccagcagtggcttctcatgtttggcataggctcgccccttagatgctttttgaaagtgtctacatatccctgggtacctcatggactatggtgtggcagggaaaccatctgtaaagtgcccaagtgggcaggggccaaatgggggtatgtgatgcctgtttttgagggaaaatacttcatttccctaatgacaagtctctaaaagccatttttctttctttctttctttctttttttttttttggtttgtagaaaatgcacatagaagacatttaccaataaaagctggtggtgattctcaggagcaacagagagagtcgacttcctctcacgtgctccagggagctaagtgcagcagatgttgctggtgtcctgcccacagcctctcagcctctacatttcagcacacactggcttggcttccaactgccagcacttatatatcttcccctgatagctttcttgggttttggtagtctctgcccatgcaggcagaagtgctgagaaatgaccacccaccctcacccctgagcagccctcgaccaatgactgagggagttggtatataaataccccagctccctcgccctcagatggtgtaactctgagctgtgtcttttattcctaggcaccacctccaaacacactcacaactgaaagtgtgattcaatccagccatcttaattccatcaacatctcttggaagttctggatcttcttgtccccagtgagtcctgctgctctatttatccctaatggcactctggcagctgaaccaatcataccctactcaagctcctattgctttgagagtttttaagtctctctaggttcctaacatagcatcggaaagggatcttggtaatgaagaaaattaagctcatggagtctctattgcacacagatgccacaagagagttgagctgaacttcttgagatccatattaatgagttggcatctgggcaacgtggaacccagaacagttgtatatcaggtctgcctaaatggtagcctgcatccgttatcagatccattgaccatttccattttgattcctaattcttgtcctggctatgtaatttgtgacatttcagagctagaaaaaaccttaaagatcatttagccaacttgttttactagtaagaatattgcattctagtgtagttaggtaatttaccgagagttcaacagcagctgaagaactgagcctgggggacagagccagacttttccacttcgctgcagcagcatttctcattgaatttggtagaagcaaatgtttcgtttcacaaagttttttattttttaaatgcctgcttaaggcagtgcaaggcactgtaggggatttgaagaacaagtgccctcatggctctgagcaatgcaaacgtgaagaaaccattacacagtatagcagagatattttattttaatatgtgggtccatgtgataaactgaggcactcaccctggccctcatgccctgataagcttgctgccacaggtgaggaatctatccttcctaatctgtgctaggactcaggggttcgcagatgagacaggagctgacatccatgtatggttaggataagggagtaaaccgccccactgtgcagtcccgtctgccttggccaacctgactttgcaagctgagcctggttgcctggcaagaagatgcctggccttgcttccatacacctgcagccacattctggttgcacagcctcaggcaggtacttaatccttttaaaattcaatgtcttcatctctaaaatactataaataacagcatctacagtgttggctggtgatgaagactaaatgaggtaacacatgaaattcttagtactcaaaaaatccttcttattattgtcatttttacccagttgccaccttcgcccccggccctaaaatagctcgcatttctccatctctcctatagagttttcctatcatcactttccccccagcttgccactcactaacaattttctccccattctcttgcactgtctgcttacgctctttgcctcttgcttctggctctctttctccccctattcctactcctcccactggtctctataccttcttacacctcctgttcatttctcattccgtttcctattttctctgttttcttgcaatttatgtctttcatcccagctccccagttcccacccccagccattttcctgttcccacgctaccaggaggttctctttcttctctgctactatttccttctcacatttatctttcctcccctctcttcccccttttgcatcccctagctgccccttcctaggccccccctactctgctgtctcccatcttccatgcccaaggaactcaacctccatccctgacctcttcccttcgtggtttttatcctggaagtgcacttgcccgctgcagtaggcagcctcttagatggccactgatgtggtcccccctcctggctttcatgttctcatgcccccatggaatccactccccttcagtgtgggctgcacctagtgactcgacaaatacagcaaaaatgatgggatgtcacttttagcttagattttaaaagactgctgtttctgtcttggctgctttttgcctctgaggaaagccagctgccatgttgttgtaaactctctgactgagagagcaacagagcaaggaactgaagtctccagccaacagccagggaggatctgaggcccaccagcagccacaggcacagggctgggagcagaccctcccccagaggagccttgggatgctgtggcccttccgacacccaagtcagaggcacctagctaagaggctcctggattcccgacccacagaaactgtgagataataaatgtttgctgttttaagctgctaagttttggggtcatttgttgtgcagtgatatttaaaaggcagaattgggccaggcacggtggctcacatttgtaatcccagcaccttgggaggctgagttgggcggatcatgaggtcaggagttcgagaccagcctgaccaatatgatgaaaccctgtctctactaaaaatacaaaaaattagctaggcgtggtgacaggcacctgtaatcgcagctactcgggaggctgaggcaggagaatcacttgaaccgggaggcagaggttgcagtgaggtgagattgtgccactgcactccagcctgggtgacagcatgagactccatctccaaaaataaaaaataaaacacagaattgtcctctatggaccaccattcagcaacattttatcttctatggccttgagcaaattactgtcattctttgggcccccgtatcctcatgacacctagggtaggagtctagtgtcccaagtgtcctattcatagcatagggtcgataatgttaaggcgtatctgtcctgttctgtttcccataggaagcctagtgaaacctgtacttcgtattttaagttccgtatctttatatttgcctcacatttttcactcctattatctgaagtctgtttctaatttctgacagaattgtaatggcttattgtgtgccttgctctgcatgacatgccaatttcattttggagtcacggctattgtctttttctctgctaatctctcttgttttgcaaaactccaatagaacgtgtgaacatagagagttgcccttgtgcctgatcttggctctgtgtggcccccaaacaggggtggatgatagacagacagcctgtctgccacccgaagcatcttttcttgcttaaaaatttgctttccagattgcagactcctttccaactccagcaaagcctggaacacattaaataaaagcagagctgaaattggatggaatgtttcagccacttagattcagacctctctgggggaagcccatggggaagggaccgggacatgcccccatggataacacaggggaagagggcttctatgctgttctcataccattcaagccttaaacagaggcaacatatttttcttaagcagggcctgtaacccaggatccatcacttatgtatggtgtccatggcaaccaggcaatggtatgggatcccttctcactggggaattccttttatggctcatttccgaaaccagcatggccagtacaggagtctgccgtttcccagttgcttagcaaccagctcctatgctctagtcactagaaaaagccgacagttttttttttttaagaaagtgtttgtcatcagaatcatatgttacattctctctactttgtctctttagaataaaataattagtgtgtgataaggatgcagaaagggcaactgctccctgttgttaaagcctctgctgttcctggcgggctgttttaggcaaggagagagagaggaaaatgttagcatgctttcggttggtaattaagcagctcgagccatctgcacgtggaaagctctacatttttaacgtctcgtgggggcatcaagtaagtacagggccagcaatctgtgtgctacatcccttcccaaaccagaaaatccagactccacccacaggtgtcatctctcctcggcttccattccttagggggttggggaggccgggatggggtgaattggcttgttgagttttaggtacaagggcacaaagatcatgcagcaccccctctactgttacagcagtggttttcaactagaggtgattttgccccccaggtgacctttggcaaggcctgcagacatttttggttgtcacaactgatggggagggggatgttaccaatatctgtctagtgggcagagacccggggatgttgctaaacatcctacaatgcaaagtgtggcctccaacaacagagaagtgtcttgcccctgatgtcaatatcccaaagtggagaaatcccaagttagagaaatcagaatatctgtcttgttaaaaaaaaaaaaaaaaaaaagctagcatgacagctgacgagaaaaaattttcacaaggtaaagggtgggacagatcaaaacccattcaacagatatcattccaaccgaaatttctgtatagcaaggaactcctgggcccccaccagcaaaagtgttgggcagagcaccctttggagttgtggcaatggaaggaatttgtaagccgaccttcctagaaggaaggagagcagagttggaatgctctgtcctggcttccaagggactttggcatgagacagatccagcttcacattctgggtctgctgtctatgcactatgggttcttaggtatttcacataatctctctgggactcggtcttctcaactctagaatgggaatctaagtgagtattatgagaattacatggcggaacgtgtgaaatgcctgacccctattgggccctggatattagctcctcccatttcccctcttgtttcagcctcaggaacccagctgccccctctccattgctgggtactttggacttttgaggaatatgaacaaatgtactggtcctataaatgactgaggtcagtttattcagcaacgagcaaaggacaaaagcaccatttttggaattttggctggtagccttagactaaatttaggcatgagggacagaaaaacccaagaaacgggtgagatgagaggcagtattgcattgatcaaaagtatggcaggccaggtgcggtggctcatgcctgtaatcgcagcactttgggaggcagaggtatgtggatcacctgaggtcaggagttcgagaccagcctggccaacatggtgaaaccccatctgtactaaaaatacaaaaattagctgggcgtggtggcaaacgcctgtaatcccagctactcaggaggctgagggaggagaatcacttgaaaccgggaggtggaggttgcagtgagctgagattgtgccactgcactccagcctgggtgacagagcaagactctgtctcaataataatgatgataataataataataataaaaagagaatgcacatggccgtgcctgatggctcatgcctgttaaatgcggcactttgggaggccaaggcaagtggattgcctgagtccaagagtttgagaccagcctgggcaacgtgacgaaacctcgactctactgaaaatgcaaaaaattagccaggcgtggtggcacatgcctgtagtcccagtaactcaggaggctgaggtgggagaatcacctgagcctgggaagtccaggctgcaatgagccgtgatcatgccattgcgctccagcctgggcacaggtttcaagtccagctccccatttactggctgtgtgtgacctcaagcgagtgacttggctgagcttcactttctcatctatgaaatggggttattattatatcgtctagtactatgtaaagataaaagataatgtatataaaagtgcctagcctggtgcctaatattaggtaggcacctgataactgatagcatgcatattcatataaacaatcttccttttttttttcttttgagatagagtcacactctgttgccatgctagagtgcagtagtgcaatctcagctcactgcaacctccacctcctgggttcaaacgattctcctgcctcagcctcctgagtagctgggattacaggcgtttgccaccacgcctggctaatttttttttttttttgagatggagtcttgctctgtcacccaggctggagtacagtggcatgatctctgctcacttcaacctctgcctcctgggttcaaccagttctcctgcctcagcctcctgagtagctggggctacaggtgcccgccacacgcctggctagtttttcgtatttttagtagggatggggtttcaccatgttagccaggatggtttcaatctcctgacctcatgatcctccctcctcaccctcccaaagtgctgggattacaggcatgagccaccgtgcccggccttttttttttgtatttttagtagagacggggttttaccatgttggccaggttggtctcaagctcctgacctcaagtgatctgcccacgtcggcttcccaaagtgctgggattacaggcgtgagtcactgcacctggcctgcttgttttttttttaagtaaaactgtcgtgcgtcgtccaaccccacatcttcactggtgctgacagtgaggctaagggctgtgtattaggaagaatgtcctcccttatcccatctaaaacagatttccctcagtatgatatgctagtgccagccatcacaacgttatgtaagtaatttttgaagctatttctgtttttagcctattctacctcttggggggtaatgagttccatacatttagcaaccatttttaacttgcttgaaatcttgagaaaatctcaagaaacctcttctttaaaaaaattgtttaaattgacaaatagtagttgttcgtattcatggggtagctagtgatgttttgatacacatgatgtataatgatcagatcagggtaattaacatattcataatctcaaacatttatcatttctctatgttggtaacattcagtatcctccctctccctatttgaaactgtataatatattattgttaactatagccatcttacaatgatgtagaacaatagaacttactcctcctacctagctgtaattttgtatcctttatcaaatctctccctacccctcccttcctcctccccttcctgtcctctagtattctctgttctactttttacttctgtgagatcaacttttttttagcttccacatatgagtgagaccatgcagcgtcttcattctaataagctggggtttggtctattttcacattatctgtacttttcataattcttgaaactgcagtatatcctgtcaacctccagccttcaccctgacctcatacagaagcccctccagccccttaatcacttgaaatgctttgtgaactccctgctttctttcttgaaatgtatcaaccagaactgcacattccagtctgtgttagaaacaaaggttagccgggcatggtggcaggcacctgtagtcccagctactggggaggctgagacaggagaattgcttgaacccgggaggcggaggttgcactgagccgagattgtgccactgcactccagcctgggcgacagtgcaagagtccgtctcaaaaaaaaaaaaaaaaagaaacaaaggtaaagtgatgttttctttccctacaaccccccctacctcacccccttactttttctaacaatttcccaaacttggttcgcctttgggcgccagagcactttcctgagcactctgcaatgagtcccaagtccctttcctgggtcacaatcgttggttcatagtggcagcagctcgtcctctatagtttgtactttttctccttgtcactcttatttcccactgaagtatatctgccaaagttgtgcccactcacccaacctcattgcacctcaccagttggcttctgtctgtatttttttgtttgttttttgtttttcgtttttttttagacagagtctcactcacttggtcgtccaggctgaagtgcagtggcacgatctcggctcactgcaacctctgcttcctgggttcaggtgagtctcctgactcagcctcccgagtagctgtcattacagctgtgcaccaccatgcccagctaatttctgtatttttaatagagacggggtttcaccatgttggccaggctggtctcgaactcctgacctcaaatgatccacctgcctcgggcccccaaagtgctgggattacaggtgtgagccactgcgcctggcctcacagtcggcttcttgttgaacagacatctaaaagcctagagattacactcctaaattgttgtgtgatcccacccgattttacccagttgactgaagctctttggaagtgcggctctaaatatgtcattgctaaaattttttccttccacaggggataattaaatcatgtcaaatatagaagcgacttgctcatccctcccaagcagatttatggaaactcacctggaaaccaccacaacctggaaaggtggcaggaggatgtttatcaggcacgtatgagcccagcttctcagaagatagacacaggtgcctttgtctctgaacaagtggcaggagctggagccacagtcacactggggttctgagtggcttgagacgggacattgtgaggtttaccaggaggaccaaaagcactcaaagtatgtggaggtcagagcagtggcaaagaaggagtccaggcgggctggggaggggtcaaggggcatcaggcagcacgtctgggagccaggatgacagatgggagattcaaaacagggcaccactagaagcctgaaaggaaggcaaggttttatcagggtaggaactgagctctggagaaagaacaggacaactggccatggctgaaaagggggcacagggtcagcaagttgaagacagatccttatgataatgaaccagggtggaaacaggaaaagagggtttgatgctttctttggggcaaacgattctctccctattcctgcaacaatagcgcaggttcctagatcagtcatttggtccattagcagctaatgctggttgtgggtatcacaccagtagatggccatcaccttcataaagctcctgcacaatgctcagctcgtgagtgctccaaggaaaacatttctgtggtgactgtgtttgggatttttgcaaactacaggtccttcttggggattcacagtgtacattagctctgaatgtgtacagcgtgcattttaaacactctgccaactcctgaggtatagaaatctgtttcattgtttttaatttaatgtttctcaaatgtagttgacacccgggtccaacaggatccttttgctatataacaaccctgaacattctgtggacacaccttgagaaacattgttctagaacattcctaatctggtgttcccaggcccttcacagcctgggcctgcccttgtttcccaacttttccttcctttattttctgacattccagccacattaagctcttcccttgcacacgctcctgttgcacatttccttctttcttgctatagcaggtgattcatcatctgcccaaaaatgggaaaaaagctgagccctgctcacttcacctcactgtcaccctcatgtctgtctatcttttgagacccacctcaaaaggagccctggattcattctctgccccatctctgctcctgccttcctgttcctataaataatcctttgccgcctctgatcccttctgtcctggtatctgttactgtcagggcacttcacatgttttactttgtataaggccatttatgccttttttattcaaacagaatccacgtctcacttttgtacccacccccctaccaacagaacacagcatatttgtaggattgttagtgggagcagaaaatatgatgccaaaacttctgaggttggggtaagttctcttctcaacattcaggccagagttggcaaatacctggctcacctgctgccaacctgtactctctcactaatggcacagactcatcagagaaggccccaggagcttctcaacacagtgctcccagcagtcatgatcaatgggttagaaaaggcatgagagaggaaatctgttatccctgatttagaccttttgccaaagtgaaagttaggagaatttagtaagctgaatgtgggagctgttaatgctacagaccaatgactgtcctctaacagaacagagcaattagcaaaagtattcattatactttcatgttcatgtctagtctcaaggctaattatttgtataattaagatgttaccaaatgcaaacaattgatgagcctgatttcttggaatgaaacatgagacttatgaaatgtaaatagctgtgaatcactaacagctttcctttacttaggcattctaccaaggcatagccctgttacattaaagaaacaatggaagtataatcccattcatattttttagatgacaaaacaatatgacgtatgaatttaaatcatagaaaaagcacaggttttaattctcactccaccattttctagctgtgtgcccttggctgtgttacataagctcaatttactcgtgttacttacagagagatgtcagtttccacattcagaaaatgggtgtaatagcccctagttcagaggactgctgtgacaatcaaatgagttaacatgtggaaagagtgcacaatcaatgtgagccattgttttcattattctacttgtatctacagattatactttgacaatgatcgcttggattttttacagtatgtaaaaaacattagagagaaatggaatgtatatagatgtctcgctataacaccatctgtgtgttactgaaaagcttccatggtctaaaaatggccacaagccccaaaataacagggttggtggggaaaaaaaaatagggttgggacagtctactcaaaacctggctgggtgcagtggcttacgcctataatcccagcaccttgggagggtgaggccagaagatttcttgggcccaggagttcaagaccagcctgggcaacatcatgagaccctgtctacacacacacacacacacacacacacacacacacacacacacacacagacacacacacaattagccaggcatggtggcacacacttgcagtcccagctacccaggaggctaaggcaggaagattgcttgagccaggggaggttgaggctgcagtgagctgtgattacactactacgcttcagcctggatgacagagcaaggccctgtctcaaaaacaaaacaaaatgaaaaacaaaaacaacaacaaaaaaactatgcaattgtaaccagagcactcacaaaaacaatgtcaaaactaatgaaacattaccccagtaagcctcagctttcacaaacatttgcacaccgcatcccagccttgaaccctagggctcctcctgctgctttgagatataggccctggagggcatttgcttctaatagggaccagttttatcaaaattaaacatttgatttaaagagcggtgttcttcgctaacccatccttctaatacaaagagaaacgttttcactgcttcttcaacagcaccctcagtttttccagaaacttgacaagagaacagcatagtggttcccaagtcactaaatcagtcagtccctgcagctaaagaaggcagctgtgtgtattctcagctttttcttaaggcctccatagagtgctaaggtttcctcttattaaagaggtagttattgtgagaaagctggctcctggcttcaaaacatttacatgctgggggaaaaaagtgcataggaacccacatgacatctgtgttataccaattcccctgtttactcatggcttgtgaggtcgctcatatataagaaacatttgtagcaacaacagtttatattgaatatctccaatctgctagttgatgtggtaagaactaaatagaagccatgtgatttaatctgcacattagtcgagtgtggtagaggtaaggtatccttacctttgaggcttagagacattaaataacttgcctgagattacaagtttttaagtagtaaagccaaaattcctacctggaatctaacgtcaaacctcatgccttttgagatcacactatccctactaaggatggctggaggcaggaaagaagaccgacatccctggccatggtaatgagtgaaagcctgattcctaaccacaagtcactaacatttaattgcatttaatcctcacaacaaccctgctacacagttattattaccaccaatttatcgatgaggaaactgaagctcattcatcaaaagacaagccacccaatttttaaaaatagactgaagatttgaaggaagaaacgtccattagaaaacatgcaaatcaaaatcacagtaagatggcacttgacacccactagacgggtggtgattataataaaaaagacataataacaagtgtcggtagttggtgatgatgtggagaaattggaaccctcgtacactgctggtaggaatgtaaaatggtgcagccactttggaaaacaatctttcagttcctcaaacaactaaacagagttatcatatgatccagcaattctgctctagatatatacacagagaaatgataacatatctacacacaaaaaggtacatgaacattaatagcagcattatccataaaaccaagtggaaaccaaaatttccatcgactgatgaatggataaataaaattatatctgtttaattaaatatttggcaagaaagaaattaaatgctgatacatactacaatctggatgaaccttggaaactttatgctaaatgaaagaagccagccacaaaggaccacatattgtacgattctattttttgaaatgtccagaatgggcaagtatatagagacagaaaatagaattgtggttgcttaggggtgaggatgatgaagggtttgtggggcaatggctacggagtacagggtttcttttggagtgatgaaaatgttccaacgttgattgtaataatggatatacaactctgtgaatataccaaaagccttcgaagtgtacactttaaatgggtgaattgtgtggtaattgaattatatctcaataaagctgtttttaaaaaaaaaatctttaaaagatttgaacaggcacttccaaaaggaagccatccagatggccataaggatatttttttaaagtgttcaacatcattaattatcagggaaacacaaattagaaccacagcaggctatctctacacaactactaggatggctaaaattacaaacacaaaattttggcaaggatatggagtgaaagagttaaaaatatattaccctggcatattaactatttaagctaaaggcacttgaaaaatagcagatgcaaaaaagaaaaaaaatcactttgaccttcatgctgtttcttaaaagcagaagatgaaattcctgtgtgaagatgccctccctattctaggagaagaggcaacagccttatcttcaaggacaagaagtagagaccaagagaattctgtacagaccttgtcaaaataactcttatcatttaaccctccccacataatttagttgcttcttcacaactaactattgtccagttcagtagataagtaactgactctaacttcttcctcaggtctttgtttctttctgaggactcttgtgccacataaaacttttattatgcctttctcctctttatccatcttaagtcagtttaattctcagacccaacagggaccctaagaggatgggggtagagattttctgctcctgcagaagcaactggaactctcatacattgttgatagaagtgtgaaatggtacaaccactttggaaaacagtagtagtttctcataaatttgaacgtgcacctgccctatggccttagtttccaattccacacctaggtatttgcccaacagaaatgaaagtggatgtccacaaaagtcttgcacaaggatatttatagcagctttattcctaatagccaagagctggaaccagactcttagtctgttttatgctgctataatagaatacctgagactgggtaattgattatgaacagaaatttatttggctcatgattctggaggctgagaaatcccagagcatggtgccagtatctgacaagggcctttgtgctccatcatcctatggcagaagcagaagggaaagagagcaagcgagcaagagagggctaaactcacttttgtagcaacccacccttgtgataacgaacccactgctgagataatggcattaatccatcatgtccaccctctgccctcatggcctaatcacctcttaacagtcccacttcttaataccatcacaatggcaattacatttcaaaatgaattttgaaggggacattcaaatcatagcacagtccaattatccatcaataggagaatggatttttaatactttggtatattcacgcaatggaagaacactgaacaataaaatggaacaaattactgatacatgcaaaatcacggatgcatctttcacacattctgggcacataagcctgacacaaaagactatatattatatggctccatttatgtgaaactctaaaacatgcacaagtaatctatggtgcaaaaatgagaaggtagtaatctgaaaggcaataggatggactgggaagagacctactggaactttccaagatgatggaagtgttctaaatctcatagatgtgtacatttttcaaaactcattgaattgtgtagttaagatttgtgtatttcactgcatataaatgttaccttataaaagaaacaattttgaaggtttgcttttcacagtggtactgatcagaagttctgaaacttttttctatgtattgtaaatgagtaaagatattcaggataatgggatccaggtttctcactatagagggcagaattaatatggaaaagatgcaccctgcagtgttggttcggaatttcacactggaaacatcaatatgaactcatgattttgtgtatacgtgtgcaagcacgtgtgtgtttgctgtgagagcctataaacaatacacgccagaggccatgagcacatttagagctaagatcttcggttccaaatactattttccaccaaaaggaaccaaccactggagaaaagactgactccagggctagaataaggaatatacaaatgagcctggaacatcttgtacaccagagagtgcttgaaggagctcccagtggccaaatatgggacaatttgagcatcataataaataataatactaataggttataatctattcaataaaataaggctctatgagttgatactgatgtaaataaaggaataaataaatagggagaagagaaagctcttctttatagtagcaagccaaccgatagtatagaaggaatggtggagttagataatcatcaatggatgttaaaactcatgggtgaatttttgatggggaatagcatatttaaatactctcaaaatatctcctaataaattacgtattaattacaaagagaaaaatagtaactctacagtggagaaactgggcagacaccgctataaccatgtgatcaaatgtaacatcaccaacattgggacaaacctccatcatgtgtgtcatgatacagtgcactgacaagggcgcagcatcacttcagtggcattctgccaaaaatgcagaacctgaatctaatcgtgaggacatattgcataaatgcagtcagagagagggaggaaggggagaaagaggaagaaggagagagaagcaaacggggcaaaatgtaactggcaaacacaagggtataagcgagttccttgcactattcctgcaacgtttctgtaagtttaaaattgtatcaaaatacaaagttaccaaaaatgttgggaaaggtgctgtgagataattccctgtgggtctcccatgtttctgtctatcttgtgagcagagccacatatagttgtcccagattgtcttttcaaagatatttgtatagtcaagagccttgaaagatagagtttgaatcccctgctggagatttgtttactgttgagtataataatatactgtctccctccagggcaaaggttgggtaggtttgcttgcagcccattacagaaaatttgtgttccctaaactcaaggcgcctcagctttgatgaaactctactttgtgcacagcatccaccagaacccctcggtgttactcctgtgagacttcagatgcaaaaggaactgatgcaatcactaagctcatgaaacttaacgtgtcatgagtaataaagtccgttgtctccaacccaagagtcttgtgtcctctgccagcatccctgaaactgtaacagactaacttgcttacaagtatgaagaagtctcagccccttcacagtttgatgattgctcatgtatttgggaattgcccatatatttgggaatagtgtggctagagatctgtctggagggagtagacagaattgatgtcaaacaacagaaaaaaatgaggagggtacaacaggggcttaacagtcaagagggagtggtgattaagataagaattctgagatttgcaataatgggagcaagactatggcaccaattacattagtgacaaattcattttctgggggattttgggggcttgcttgtttgtgtagttctcatcacatatgcatacataaaatagagacccaagagatgttattcatctgggttgttagctaattggtgccagagaatgtggacctactttttattttttattttttattttttttgctcttagtagcatatgacacagtggttggcataataaatgccttttaatcgattgtttccataagaaatagcactatttttgtgctggcattcgtggtagagagaaaatgagttttcatgaaccccttttgctatgatctgaattattatgtttcctccaaatttatatattgaaatcctcacctccaaggtaatggaattaaggggttggagcctttggaaggtgataaggtcatgagggaagacccttcacaagtgggatgagtgcccttacaaaagaggtctcagagaaacccaccgtcccttctgccatatgaggttaaagtgagaagacagctgcctagagaaagtggggcttcatcagacagggaatcttccagtactttgatcttagacttcccagcctccagaactgtgagaaataaaggtctgtggcttacaagccacctcatctacagtcttttgttatagcagcccaaacagactaacacacccttcatactatttcactaaaaaaaaagaaaaagctttttaatcctcattataaatgtaattaatgtttactggaataaacaggaaattttaaagaacaaaattaagatcatcctgatctcactattcagagaaaatcacctttaatattttagcttatttttacttggtacaaaattgaaattcttctttttggttgtttttttcttttcttttcttttctttttttttttttttttttttgagacagagtcttgctctgtcacccagcctggagtgcagtgacgtgatcccggctcactgcaacctctgcctcccaggttcaagtgattctcctgtctcagcctcctgagtagctgggattacaggcgtccaccaccacgtccggctaatttttgtatttttagtagaggcaggctttcaccacgttggacaggctgatctcgaactcctgacctggggtgggccacccaccttagcctcccaaagtgctgggattacaggcttgagccaccgcacccagcccctgaaactctattgtatgtaattttgtatcttgccttttaaaccttttctattatactgaaatggttttatatcattaaattttctttggaagcataactttaataaccatatattatatttaggctgggcatggtggttcatgccttgatatggtttgactctgtgtcctcccctcaaatctcatttcaaattgtaatctccataatccctacgagtcgagtgagggaccaggtgggaggtgattggatcatgggggcagttttccccaggcttttctcgtgatagaaaatgagttctcacgagatctgatggttttataaggggatcttccctctttgctcctcactcatctctctcctgctgtcatgtgaaagaggtcattgttccccttccccttctgccatgctggtaagtttcctgaggcttccatggccatgtggaactgtgagtcaattaaatctcttttccttacaataaattacccagtctcgggtagtacttttataacagtatgagaatacattcctgtaatctcagcactttgggaggccaaggcaggaggatcacttgagcctaggaattcaagatcagcctgggcagcatagggagacctcatctctacaaaaaatttttaaaaatttagctgggcagggtggcatgtacctgtagtgccagctactcagaaagttgaggtgggaggatcacctgaacccaggaggttgaggctgcagtgagccatgattgctccactgcactccagcctggatgacacagcaagaacctgtctcaaaaaaatcaaatacatctatatatatactgaatctgccatcatatatttagttatttttccagttatgatcattatattatttctaattttttgcttgattttattcaataaactctgattatttgtttaggattaatttctgtgggtggaattactggatgaagtcattgccagctagctttctagaatagttcttctactttgccactccatatacaagcataccagtatgcatatattgcctggtaaaatcttaaccaaatttaaaccaccaaatttgaattaaaagcatgtattttaatttgcaattatcaataagtttgtactttaaaatatgaatattaacatttgtattcttattccacaatttgtttgtgttctttgctcacttttaaaattgggacttcagtgattttgtcattgatttgtaaaactgctttaaacattaaggttgttaactttttctctatcataattgtcacttttttgtataatttattattgccttttaaatgttgtcattttttgaaagatagaagttaaaattttaggctgggagcagtggctcatgcctgtaatcccagcaatttgggaggccgaggcaggtggatcacctgaggtcaggagttcgaggccagactgaccaatatggtaaaacctcgtctctgctaaaaatacaaaaattagccgggcgtggtggtgtgcgcctgtagtcccagctactcaggaggttgagacaggagaactgctcgaactcaggaggtggaggttgcaatgagccgagattgtgccactgcactccagcctgggcgacagagtgagactcagtctcaaagaaaaaaaaaaagaagaagaagtaaaaattgtatgtggttaaatctgtatttccttttgtttttttttttttttgagacggagtctcgctctgtcacccaggttggagtgtagtgcagtggcgcgatctcagctcactgcaagctccgcctcccaggttcacgccattctcctccctcagcctcctgagtagctgggactacaggcactcgccaccgtgcccggctaattttttgtatttttagtagagaggaggtttcaccgtggtctcgatctcctgacctcgtgatccgcctgcctcggcctcccaaagtgctgggattacaggcgtcagccaccgtgcccggccctgttgtgtgtttttatactactttaaaatgttctgaaatgtatgtggtaaaaattctgatgggagacactaacttaatttttcccagaataatcatttccctcagtatgaattattaaatattctatacttctattaatttgagatgtccttttaatcatatgctaaattcttatatactgtggggaagtggatcttactatttttgctacctccacaaaactcaaaataacaatatgcaaggatttgtaactggagagtttgatcctaaagggaggcttaacaaaatttccagcggatggcgtgcattgttgaaaaaagcccttctttttgaaaattactatgttagaagacacataatctattttgttaatctagttacagattctcgtgctttgtttattgtagctcttttagcatacttttctagtagagttagcctcccccacttaccttctttttaaaaaaattattggttgtttttgcttatttattcttttgtatgaactttacgatttctttatcaagctcctcacttggatagtaattcaacttacattaagtgggtatgttaatttgtaaagcattgccattttagatttgtcatcttttatgtctcttagtcaaattgtatgcttttcttcacataggctattacttgaaactttaccctattgggtcttggtttatttttgtcaaaatccaattttcactcacttttgcctttcactcacttcctcttctagctaggttcagttactttttcatgtgaggccgcatggagtaggccagtggttctcagactttaataggcattagcatcacctgaagtgcctgttaaaacacagatttttctgattccatagttctgggattaggcccaagaatttgcatttctaacaagtcccaggtgatgctgaagctggtcccagggattacactgcaaaccactggtatagaccaatgcttctcaaactctgattatttaataaactcttattaaataatcttatctgattaatatctgattaataacttatctgattaattttagctgattaataactcttatctgattaaaataaactcattcttatcaaacgttaatgtgtgatatggtttggctgtgtccccacccaaatctcattgtgaattgtagctcccacaattcccacacgttgtgggaaggacttggtgggaggtaattgaatcatggaaatggatctttcctgtgctgttcttgtgatagtaagtctcacgagatctgatggttttataaaccgtagttttcctgcacaagctctcttctcttgtctgccgccatgtgagacaagcctttcaccttccaacatgattgtgaggcctccccagccacgtggaactgtgagtccattaaacatctttcttttgtaaattgcccagtttcgggtatctctctatcagcagcatgaagacagactaatacaatgtgcatggcaattacacacatggttaaatgcaggttctgatttagtaggtcttcaccaggatctgagattctgcattcttaacaagttctcaggccaattctgctgctgcttgtccacacaccacactttcagcagcaagggaatagaacagaatgaagagtgtgggctttgtagtctgacaaaactgagtttgaatcccagtctatacttactaattgagtaaccttgagcaaataattaatttaacttttctaaacccagactttatattaaatcaaaaataacaaagcctattttgtgaaatgatgttatctggcacaaagcaaataatgtatgttttttctctgactcataactgagaattgtatttgccctactgaatattgactcaatatcagagtcaacccaaaactatgggtcttttgtttgtagtctaattgcaggtagcttcatttgaatctctagggtggcatttctcaaactgtgttccatagagatgttctttaatgttctgtggtcaaattcattataagcatattttcctttacattgttgagcatagttataatagctactttaaaatccttgtcggctaattccaatattggggtcctctaggtgtcggtctttgttgattatcttttctcttgtaggagtcacattttctgatttctttgtatgctgagtaattttggattgcattctggacaatgtgaatgatatggtatagacattctgaattttatgatgttcctttaaagagatttccgtttttgttttagcagaaagttaacctggctgaactcacactgcaaactctgtcttcctggagaaagacatcactaaaatctcagttaatttatttttagctgggcttcttggaatctgttccatgcatgcatggttcagatgtcagccagagatttatgcatagaatttgggcctcctcctttctggttctctcctttctgagatgtcccccacttgctagctgctgtagttatccagagctgtgtttctagttctccaagtaacactgagcttctatttgagttttaaccattcttcctggaacagctctctgtagagcctgttctaggaccaaaagctgtaaaaatgggaaattcatccaatgccattcccttcttcagtattacagcccatttttgatcattttttagtaacttcaaatagttgtctgtattttttgagagtatattttctcaagaatttagtctttgtctacagaagggttggtctaacatgagttacttggcctttactagaagtgaaacctgtgtgattttctttaatctagtattccctaaagagattctttatttggcagaaccttattagcatatcacagaccttagtattttaaagaacccattattggaaagtgctattctcagatttttctcctgggaggtttagaaaatgctgataaaattaggagattagatagtgatgaagcaaaatgagttttgaaggaaagctgttggaaataaacttgagaaatgcatgaaaaatgcagtgtttctcttaatactcttcaagtaatattctatggagaagggtggtggttttctacggcattgctctctgaaattagaatacattcccaattccttaatttctcttaatctattattaggcagtcgagttccatacatttatttcaacccttcttgaacctacccatgtggaaggcagaagcgctgggacatgaccacccaactcagctctgaagcagccctcacacaatgacggggttggtatataaatttatctcaacccttcttgagcctgttcatattgttaatgttatctaattttaccattaaataaaaaccaaaatatttgtttaggagaattaaggcctttaattttattttgcttaaagtcccaagcccaaaggttgggaatatgctacaatggacctacacaaataagtaaataataccaaatactacacacaatccatacaaccaaaaagattcaagtaaccaccatttttttctgccctctcattttatttatttatttatttatttatgtatttatttattttttgagacaagagtctcactctgttgcccaggctggagtacagtggtgcgatctcggctcactgcaacctccacctcctgggttcaagtgattcttctgcctcagcctcccaagtagctaggattacagatgcatgccaccatggctggctaatttttgtatttttagtagagacagggcttcaccatgttggccaggctggtctcaaaatcctgacctcaggtgatctgcccacctcggcctcccaaagtgctgggattagaggcatgagccattgcgcctggccctaccctctcattttattagaaaaggtattaaataaataatttgatattagaaaataacaggatcagtaaagattcagcctaacacccatcttttaactacaatggatgtacaagtaataaaactaagccatgatagttgctatttagataaataaaacttgaggtaaagtgtctttttgatcacaatagaataaattgttttcattactgccaagtaaattttattgtactctatttctctgaaaattggcaaacagtgtatcataatagcatagagagggaggggcccaagctcagaggccagataccctggggttgaataattcctcagtattataaaaattaaattagataacatttgtgaaatatatactgtatataaaatacctaacataatggctgacactcagtaaatggtttccttcttctatctggtttttccaggactgcaaaaaggaaattctttgatagaaaacctggacagaaacattttattttattttttaacttcaggcagacaaaggcatgaaagaaatgtgcccttttgttgactgattgacagctccaaaccgaaccagaattttcaaaaggtggacctgatctcgtaacattgtaaattcagtatctatacggttcatgaaaattgttttcccattgcttctacctttattgtcaagctgtcaaaatagcaacttcctacttaagttatatttatgcaagcatataaagtgctttttattaaatttacttttggttgaattagatggactattttagaggaaataaatcatttgtataatggtgaagaaattgaccttatgggcaccttcctaagaatgatgtttcattagtgctggatcagcttttggtatctgcaagacaatctgagatctggagaccaagggcagtatatttcatttacatactccatcaggctctctgcctgggtcctaactcacctcaccaatgggcttacttttgtcttcattctttgttcctgatatatatataggccagtgcatttgagacaaaaccaataagaaggcaggagccaggagctgtttctaatccaagcatctcacataggtcaaacctttaaagatgggaatgaaaatgaagctgtccactctggtccattgtcaaagaggtcatttggcactcatctcacaaatggggtagcataaaagatgggaggaatggagtgcgatgggggcagggggaggcgatatgcagaaatgaccaggcagaaggttaggcccttggtttctcagtctacaaatcctggctgtgattagatttggtaccgcacacttttcagagattgctgggggagaaatcacctgccacctgcattctgctggttggatttgctactgatggagaaggtataggctttacccaggaccgcattttttttttttaactgccttactcacatgtaccaatgccacaggaaattgatggtaaccaattgtctatgtgcttttgttagcacctcttttctgctgtgctgggctacacaattaccacagcccttgagaatgcttattgtcaataggagtaatttcacatcccatccatttagtgaaaagatgtgaaaattgatccagcttctgcgataagactggaaccagggtgcaggctacaaatgccttggaaataaatatatgtccatcattgttttcattaggtattgctgtagcccagcctccagggaaatgaactcaagtccagctgtcttgccgtagaagttcagatgtactcccaatctggtgaagtgggctgtcagtttcatttattgttaactttttgtagtggttgtcaagtaaggggttggcagtctgaagagcacaattctgttttatccacagacaggggacagtgtaattcgacactggctgccaaggaggaacttgtccttcctatccagcttattgtctggactctttttttatgatttcaaaagtctcttcaaaagggcaacaaaattagccttaaatagtatttcttggattgcctttaacaatggcgataaggccaaagcttctagtcttgacagaagtggtttcatgacaacttgtttttatcttgccagaataagcaaggaacttaaaaatgtgttttcattatggctaaagactgtgtttcagctgatgtctcttgcaaggaaagaacaatctgcaaactccattattatgtctctcattcactttctgctcctaaggcaaaaagatttttgtgttgttttcttttttgttgttgttgttttaaagaggccctctatttcaattagcacaattaacatatcaagaatttgtgtttccataaattctacatttcacttccaggaatcagactttaaaaatgaccttcatttaccaagagctgtaatcaagatgaaaatcttcaccctaaaaactaaccttggaaacagaaggctaaaaaaagaaaaagcataatacagactgtgttttccaagtcttcttcccttgcctggtgacattagcctggctttgatctatagacatgacatcatctatagggtgtgccttgtgccaaacatactacatttctttaaccaagacagtggttttgtgtagacttagagatcaaggctaaatagcttcagagctggtctgagtcttcacagacaaacaggtcagagcatatgtgagttacacaactcctgcagacagcccagcctcttcctctgtggcccgctggagagtttacatttgtcaatgacttccttcagggcctggctcaagattcatttcctccgagagtccctctcctgctaactcacctcactcagcccttctacctcatctgctgattactcataccctttttcctgctctgccaggcactcggttctattttaccttgtgacggttctctacatttttactttatcctttggctaaattaaaattgcctggaaagtagggcctgtctgctacttcttttgtgtgcttagggagcatgttagtgctacacgtaccatagtgtctttttcttttctctttcttttttttttttttttagatgcagtttcgttcctgttgcccaggttggagtgcaatggtacaatcttggctcactgcaaccttcgcctcccaggttcaagcgattctccagcctcagcctcccgagtagctgggattacaggtgcccaccaccatgcccagctaattttttttgtatttataatagagacaggttttcaccatgttgctcaggctggtctcgaactcctgacctcaggtgatccacccgccttggtctcccaaaatgctactaggattacaagtgtgagccactgcgcccggcacatagtttcttaataagagaggagtattctgtggttgttgtgttaggcttgggaccctgcctttgccctctgttcctaaaagccaaactcactgcttcaacagcagggagtcttcccagtccactctggcaatggcatgccaccttggtatagtcctctctggtttgaccccagaaatctgttccaagcttctctcctcagtggctaacatctcatgggttttactttccaaggtagggatgggggaggcggggaagaagggtgcctgagcacagagccacgtcaagtggagagcaggggacccaaggaggatgggagcagacctttaggtaccacagggaacagtggaggagcaggtagctggggaggctcaggttggggaggggccagggaaatttagaccaaaagtattcagaatctatgctgatatgaagaatagtcaaaggtgcaattaaagcatctctgaaataaagatgtgaggtcgtgattctaaatccagcctcatattttcctagggtatatgtgctggggaaatatgaagccacagggtaaacaaggtcctttttttctggaatgtcagccttatcaaccactttataaagcttccaattacaaatgaattaacttaagcaactgccgcccaccaccccccaccacccatctttttggaggggttcacttgtctgggaagcccatgaagcttcaggtatggctggatctaggtgttccaatgatgttgtcagagctgtagctctttccatctttctgctctgcttggcctcattctgtgtggaggctttctccaagttacagttaaactgactgctggcaactccagtccttattctctttgcttagccacccacagaagagaaataacttctttctcttcatatttatacaccaattttaaaaaagatacttcaggttgagtgtggtggctcacacttgtaatcccagcactttgggaggccgaggagggcagatcacctgaggtcaggagtttgagaccagcctggccaacatggtgaaaccccatctctactaaaaatacaaaaattatccaggtgtggtggcgggtgtctgtaatcccagctactcaggaggcgaggcaggagaatggcttgaacctgggagatggaggttgcagtaagccgagatcccactattgcacgccagcctgggtcacagagcaagactctgtctctaaattaatataatataatataatataatataatacgagacttcagttggccctgctggaggcaggtgcccatggaataccatgcttgaccttgcctatctacagcccagccctgtgaccaaggatccaaagcaattataaatgacagccccacagcaaggatgcagtgagggggactgtgttttccttctagaaaaggatgctggtagacaaaaactccatgtccatgttgaataaaacatttttatactcaaataatcccactttgagctacaagcaggaatacatgatctaccttctcccactgataatggaagtttgatgaaaaagtttgaggagcactgatgaaaatacatagctttttaaacccacagctactgtgtggagttaggtctgactgtactcacactggatgttgtacctttcagagggaagcctgacctgcgtttgtgtgtgagattgcaggccctgtgtctctaatttcacggagagcattacttgcttcacggaccagatggaactaaattgtcagatggtgggcagctgcaacaagagccagtcatggctgttgtcacccattttcaccccagtggggtggacaccataaacagtggtatgaggatatgagaaaggactggggaagctacaggaaaatgtgcaaatgtataaaaggaagttggcatggaagagctcatggctcttgtcaggacacatagtatcccactgatccaaagatctgacctgtatgtgcgtgtcctgcctggcatccaagctgccaggatttcatgctccccaagctgaggttacaccacagcagggttgtagcaagtgctgccagtgctctgcacgtatccctttgccttaccacttctgctgtagaatgtgagacttcccattgcaagaacctgcatttccctgcctgagggtgctctctggccgctgctagtgtggcaccctggaaatgcccggagatcattccccctagggcagcccttagtcaatgactggcaggattaaagaaataccagagctccccatccctcagaggagcctgttctgagtatattccacactggtgctcagactcccgcagtgggattgatctccagttgtccatagctgtggctagcttggtagcacctcctgtaccgtctgctttccttcccttctatcatgtgcttccgtacttacatcacttaaactacttgcacttgattcctcatctgagttaacttctttttttttttttttttttttgagacagagccttgctgtgtcacccaggctggaatgcaatgatgtgatcttgacttactgcagccgctacctcccaggttcaagtgattctcctgcctcagcattctgagtagctgggactacgggaacgtgccaccatgcacgactgatttttgtttttgttttttttttttttgagatggagtctcgctctgtcgcccaggttggagtgcaatggtgcgatctcggctcactgcaacctctgcctcctgagttcaagcaattctcctgcctcagcctcccgggtagctgggactacatgtgcgcaccaccacgtctggctaatttttgtatttttagtagagatggggtttcaccatattggtcaggctggtcttgaactcctgaccttgtgatctgctcgccttggcctcccaaagtgctagaattacaggcttgagtcaccacgccctgcccgtttttgtatttttaatagagacagggtttcacatgtcgggcaggctggtcttgaactcctgacctcaagtggtccacccacctcagcctcccaaagtgctgggattacaggcgtgagccactgcacccagccctcatctgagttaacttctggagtaactcaaaccacggtgagagttttcaggaaaaaatctcaggatctttccttagaatggagaaggctttctgcggtttttggataggaacagtggacccataatgcaaatgtccactaatgtctctgtagattcatgtggttattaacccttatattagagctattctgaggttatggaatgatctggggagtcaacatgatcccataacacctctattggttaattattgtataacaaggggtttggctgatctaggctaggattgctccatgcatctattgtcagctggagctctcttctatactgagtctggccgggcaactctactctgtgtgtctctcttcccctcctgtgaccagccagccaacctggacacattcttctctttgcagtggcagaggtggaagggtacatgttcaattgagcaaatgttttttaagtctctatttgcattacatatgtgaatgttcctttggctcaagtaaatcagatggccaaattcagagtcaaagggtaggaaaatgcactttttcccttttggggatgagcggcagtcacgtggcaagggatatggaaagaaggagagatgaagaactgaggccaaatctaccctacacctatacatctgctgtcctaagtctctaccattctgctcatctacccctgggagattctgcagggaacacttggctgtcatcagcttttataactagattctcaaggaaattaattctagcttgcttctttttcttagaaaggacgcattattttttctctaatgcaataaactttttatataattttccatgaatccaataaagatggccatctgaacttgtcttagtactgaactaatgaatttgcagtgaaatgtgtatttcgatagctgacttatgaagggaccgaattggaaatcaggaacactgcttccagacaacacacagatttccagaagtgtttaatttgaggattccttacttcttaaactccacacagaccatgctcaggacttcctgagacatgctgaaatggcagtgtagtagaaacacttatcaatattgatgctagtcccattttgtattgtctgtccatcagaggagaaaaaaaagatttatgactcattgttttccaaagatgctgcttcctctgcagttttgcaggttgtttttggatacaattttctccttgtttatacaatgcccactgaagtgctttttatatcccaggtttgtacgtttacaggcccatcagccaatttcatacattattttctgccccatagttgtctttggtggtttgaaactgacttgatacataaaaaacaaaacatatctagattccgccagtgccattaaaaataatcatattgtttgacctgtccctctgatgataacctttcatgatagttctgtttccttagatctgtcttttgggattgcctttgggcgatttctgaagtggtaggtttctggagttctctagggaattgtcctaggttctctggagccagagttccattatctgtgagagcacaggaaggaattttacagtaattctgctacagtgaaacatttgccttcaggccggaattgaaaatagcagctggaaggacatttggaaagaggtttggggggtgggggcggtttgtgggagtgcaggagaggtggagacagagagagctttcacatttggataaaaacactagctacaaggcaaaacggagacagggctggcatcttctacccttgaaactatcccaaattaaattctcctcgggcttggctcttaaagccagttatttcagagccgtgagtgtcggccagggtcagcacttgctctcggtaatgaacgctgagcgccacgactcctggatgatgaccagacacaccggcccagtttcaccactgctcctcccacaaaaagtcaccatccaaaatgtggaccagttccctggagtcactggtaatcgaataactaaatttcagccctctgaagacttggggaagacatgttccacctttacccacaagtgtcattgcagtaaaggacacaaattataggtttgggcactggcctaagaaataaacaaaagaatttcaactaggaatagaaccatctacaaaaccatgctttaagagatagttgatagctagtgtccaagatcacgggccccagtgaaccacgccttccagggttagtatttgtgccttgccaactgtgtccagggttggttccttctggtgggttcgtggtcttgctgacttcaagaatggagctgcagaccttcgcagtgagtgttacagctcttaaagatgggacggactcaaagagtgagcagaagcagcaagatttattgcaaagagtgaaagaacaaagcttccacagtgcggaagaggaccccagccagttaaggccgctggctgggcggggtgtggccagcttttattcccttatttgtccctgcccatgtcctgctgattggtccattttacaaacctctagctacagggtgctgattggtgtatttttacagagcactgattggtgcattttgcaaacctcttctaagaagagttctccaagtccccactcgacccaggaagtccagctggcgtcacctctcaaaacttcctccctttgagtctgggctgccttgtgacttacttgtgactaatagaataaggcttaaatgacattgtgtgacttgtgaggctagattataggaagtcttgaagcctctgtctgggtctcctagacacaacttcttgctcttgggacacgcccactagaacctagccaccagcctgtgcacagtccaagctacacggagagtccatatgtaggcgttctagttgacagcccagctgtgctcctggttgacagccagcatcgactgttacttcagatgcctccagccccaaaccccagcagccattgtccacaaccatatgagatatcacaagaaaactgcccaaattgcaagcctgaacacacagaatgataagagataataaattattttaagccactagataactagaacagaaattatatatttgcacacagctatgtgtgtatatatatatatgcttttgaatggatccatcaatgatggatcagttgaatgattttcatttgctcatgtattcattgactcaacatctattgagcatacatgtcaggtactatgctaatctctgggaatatagtagtgaacaaattaattatggtcttgcctctgaggaacctacagtctagtaagggaagatgacaataaacaagcaaacacacaaataattgcgaacttataaatcatgtcatttttttaatttgaaaaaaaagaacatggcgctatgccagaataagaaaggaaaatccagcctagcctggtaatatggtttggatttgtgtcctcctccataatgaattgtaatccccattgttggaggagaggcctggtaggaggtgatgggatcatgggggcggatttctcccttgctgttctcataatagcgagtcctcctgagatctggttttttaaaagtgtgtggcacctttcatttcgctttcttcttcctgcttttgccatgattgtaagtttcctgaggacttcccagtcatgcttcctgtacagcctgtggaaccacagaaccaattaagcctttttttctttataaattacccagtctcaggtaggtctttatagcattgcgagaatgaactaatacacctaataatcagttaaggcccctctgaggagctgacttttaagtggaatctgaaacgcaagaaggagccagctacattaggggtggagaatgcagaaagctttctagaataaaggaacaataaagaccctaaagtgggaagaggcttgggatattgggaggacccagagaaagccatgatgatggagtagagggatctaggggagagaggccagagaggaagaactggacatgagcagtaggcttgtaggccatggtgtggggtttggattttctcctaaatgcaatgggaagctatttaaggcttttagcaggggagtgacatgatccaatttacattttaaaaaggtcactcagacagcctggaggataacagattggaaggggcaagaaggggatgagggaggccgccatccaggtgaggtgacgaggtgtctgaagctgcaggtggaaccctgggaggcaccacacagcacctgcttcctgctgcacctcagacggttccagcagcatttgtgctaaggcaggtcttctacgaagtgtactagtgactgatgacaaatgctgtaggcccatagtcacatcccgagaatctctccgttgtttctgccatgcacacactatcccggttctggcttgatagatcaacaatgcctacagctcactcaaccccgcgaggtgtgtgtcaaggggtgctcagagcctgctcccgaccccactccggtgcaccctcatctcacacaggatgccgctccagaggtggctgtgggtgaagggctgtaggaatatcgcccgcccacccccaccccgagccagcagcaaatcctgtatactgggacatgtgatgtctgaagtgccaacccatctggttgaccagatttgctgccttgatgaagctgtctttcctgaccaagttggctgttgttaccaacagatactgggtccttgtgctgttgttaaattagttgtgaataaaaggaaaccagagcaactaaagcctgcggttcccataggctagagaaaatctgtcgatagcaatcgtttcctaggatggtcattacaaaggtattagctctgcatgttcagttcccctctgactttcaccggatttatagattgttcgttcataggaactgccaggcacatttctgacaaaaatatctgcatgtacgtagccaaatgtgtgtggcaggcactgaactgagcacgttggggaatagatcccatcacctacctactcacaaacctcaccttaaatctgtttcccccagcaccatctagctactccctgctgtgaatttaagagttaggctgggcatggtggctcacgcctgtaatcccagcattttgggaggctgagttgggcagatctcttgaagtcaggagttcgagaccagtgtgattaacatggtgaaaccctgtctctactaaaaaatacaaaaattagccaggcgtggtggtgggcatctgtaatcccagcgacttgggaggctgaggcaaaagaatcacttgaacccgggaggcagagcttgcagtgagccgagattgcgccattgcactctagcctgggcgacagaacgagactccatctcaaaaaaaaaaaaaaaaagagttaacctttggccagggcggtggctcacgtctgtaatcccagcacttttagaggtcgaggtgggtggatcacttgaggtcggaagtttgaaactagcctggccgacacggtgaaaccccgtctctactaaaaatacaaaagttagccaggcatggtggcaggcacctgtaatcccagctactctggaggctgaggcaggagaatggcttgaagctgggaggcagaggttgcagtgagccgagatcgtgccactgcactccagcctgggcaacagggtgagactccatctcaatgaaaaaaaaaaaagagttagccttgatctctctcttcctccgtactggcatttactgaatatctccaaaccactcacttttctcccctgcccactgctctcctagtccaagatgcctacagcagcgacctctcaggcctcagtgtccagactcctctgctcttctccctgcagccttgttctgagctccccggactcatcacttcctgctcccacctcatcctctatacatcagccgtattcattggccattagcccctcaagtgtgctctctctcaactctgggccttcccatatctcaaagagttgacagattgccaacttcagccctgctttgttttgtaaattaagttttactggcacccatccaaccccattcattgataggttatctgtggctgcttttgtgctacaacaacaaagttgagtagaaaactttgccgaccctccatatacaatttcttctgcctctcctcttcttatgtcctttctccgtgttcacaccttccttcccttcacttggttaatgcctacttacccttcaggccttagactggaaataacttcttccaggaagtcctccctgaccacaccctatcccctgtatatgttcccatagcactccattgttgaatcacagcagtaattacaatggcctgcttacttagacaagtctgtatccccactagattgtatgttccttgaggacagaggctgggttgtaaacccaaaatatctgagatgggtctcagtgaatttagaaagtttgttttgccatggttaaggatgtacccatgacacagcctcaggagatcctggccacgtgtgcccaaggtggttggggtacagcttgcttttacacattttagggagacacaggacatcaatcaatgtgtgtaagatgtacattggttcggttcagtaaagtgggacaactcgaagtgggggcttcccagttagcagcaggtaagagacaaaaggttgcatttttttgtgaatgctcagtgaatcttcatttttacataaacaatagggcagagggagccatccgatatgcattgtctcaggtgaacctcagaggggtgactttacattctgtctgtcctttgtccacaaggaatttccatttgtctaaatatttaaatgttttaaaacaagctaacaaacagttcaatgaaatacctttatactctcagcctaagaagtattccttcatatgtagtgaaaaatacatgtaaagctatgatttgtatgtgattaaaagttggcaaactatttaagataatttaatcgttatgaatgtccaggtgttctaatattttatattcttatgtttgttttataacatttactcttctctttattttggcaaaaatcactttgttattgtaatctagattttcacataatgtgtgttcaattgctagtaatctaaaggattagaaataaaattaattgcattaaaagtgtacaaaatttggatatattttcaaaaaagtaaatcaaagtaaaagcaaaatatgaatatttactttatatgttttttctcctaaattaatcaaaactctatattaaaattaaaaggcaaaaaatatataattaaggtcaaaattttaaatcaaaatgattcaagctaaatttttaacttcgtgaacatttaatgaaaccttattaaaaatatatgtaaataaaaggattccagttctactatgcaatatctattagttggcaatgtaaagaattggtatcatttcatatgctccatctagacctacataggcacaaatataatatgatttgtttaatatagttaacatcatgctacttgataagcaccctcggaactacaaattgaaagaatactaagagaagcaagaaaatggacgcttagccctgatgggaaatcatacctcgtttcgtgacaatctattacattcatgtcaagaggaaaggttggacaacttatttgtcttttctcttacctaagtcgttcgtctgctcaaatcctccttgcttgccaaagaaacgtcttcttccaacatcagcagcggcacagtccacaagcctttgtggtattctgacatggccatcttttgtttgaggacacactgcaagggacagagggaagcattttcctgactcctgaacggtgttagccacaaaagtagttgttttgagttacaggttatgctgtgccaatgctgagcatggtgcccaagtgacagaggcaccctgtcttctttttttttttgagacagagtctccctctgtcacccaggctggagtgcaatggcacggatcttggctcattgaacctcccagattcaagcaattctcctgcctcggcctcccgagtagctgggattacaggcgaccgtcaccacgcccaactaattgttgtatttttagtagagacagggtttcaccattttcgccaggctggtctcaaactcctgacctcaagtgatctgcctgcctcagccttccatggtgctgggattacaggcatgagccaccgcgcctggctatcttctttaataagtttatttttgtgtgtatttgtcaaatgcagcatcctctaaagtgaggggccatggtagagacctcttttgggtgggtgggagggcagtactcctctcctgtccactattgtatccctcctgcttaccatagagtctggcacacagtaggtgctcaatacatgctgacttgggcacaatgaagaatttttattattttgaccaatgaggcactaagtcataaatgactgctctctggcctaatcgccattaaaatatagccatctagtaaagcaggggtcagtcaactttttctgtaaagggccagatagtgataaatagttttggtttggtgggccatatgatttctgttgtaaatactcagctctgctattgtagtgcagaagcagccatagacaatacattaacaaataagcatgtctgtgttccaacaaaactttatttaaaacacaagtggggccaggctcgatggctcatgtctgtaatcccagcactttgggaggccaagataggaggactgcttgagcccgggaatttgagaccagcctgggcaacatagtgagagctcatctctacaaaaataaataaataaacaaacaaataaatagctggatgtggtggcgtgcgcctgtagttccaactactcaggaagctgaggagggaagattacttgagcctaggagtttgaggctgtcgtgagctgcgattgcaccactgcactctagcctgagtaacacagaaagagaccttttctctaaaaaaaaaaaaaaaaaaaggtggcaggccagatttggcacatgggccatagtttggcaaccactgtactagagcataagaggagagggatcctgctaatgaggaggagaaggcagagttgaaaatatttaggaggtggaattatcaggagtggatgccccttagttattgcagcataccagcagaagcctgagctgaaactgcccggagatgccaaagcatcctcaagccttgccctccttcatctgggtggctgttcctccttcctggcttccctggtttgtcacccctgctcatgtttgtcttactataggtgtctccagatttctggctttctcagtgcttctacagcctggctgtgcactagaatcacccagggtgtttatttaaaatgtccctgccaagacccgtgtattagtcggctagggctgctgtagcaaaatactgcagactgggtggcttaaacaacagatttctttccctactgttctggaggttacaagcccaaaatgaagatgctgtcaaggctggtttctggtgcggcctctctctttggtttgcaaatggccactttctctctgtgtcttttttttttttttttttgagacagagtctcactctttcaccaggctggagtacagtggtgcgatcatggctcactgcaacctctgcctcccgggttcaagccattctccctaagcctcccgagtagctgggatttcaggcacatgccaccgtgcctagctaatttttgtatttttagtagagacagggtttcaccatgttggccagggtggtctcaatctcttgaccttgtgatccgcctgcctcggcctcccaaagtgctgggattacaggtatgagccaccgcacctggcctctctctgtgtctttaagtggccttttctctgtgcatgtgcaaagaaagagaacaagagagtgctctggtgtccctccctcttctaataatgacatcagtcccatcaaattagggtgctacccttataatctcatttaactttcattatctctttaacagcctatttccaattatagtcacattggaaattagagcttccacatatgaattttgggaaaatacagtttagcccataacaccaggtttttggattcattggtctcagggggagccaaggtactgacttttttttttttttttttttttttttttttaataaaagctgcccagaaaattctaatgctcagcatgtttgagaaggactggtaaccagttgatattctggctctggtcttattaactcagctctgtcattcttccaggacaaaaatgcagttaatagcttgccatttccatgcttggttgaactcttttggccagcccccacttcaagggaaggagaactggatgatatgtagaaggaacagcaggagaaaggagatttccaggtttctacttggctggtggcagggccattccataggcaggagcaggtctacaggtgaaggtgatgtgattgcctgtgtgatgatgactgagctgcctctgagacaggtgcacattgttatcaataagcaagtctggaattgagagaaggaatcttgcctagaaataaagattttagtctttatcagcaaagagttggaagttaaatgcatgggaatgaattactgggaaaataggggcaaaaatggaaacctggagaattctagcacttaagagaggaggagaaaaagaatttccagtgactatgactaaaagcagccatttgagttagtgggaaactagaggaatgggtataaaggaggaagaggtcagtggtaaaatgtaaccaagggtcaggcacagtggctcaagcctgtaatcccagcactttgggacgttgaggttggcggatcacctgaagtcaggagtttgagactagcctcaccaatatggtgaaacctcgtctctactaaatgtacaaaaattggctgggtgtggtggcacatacctgtaaacccagctacttgggaggctgaggcaggagaattgcttgaacctgggacacggaggttgcagtgagccaagattgtgccactgcaccgcagtctgggcgatagagcgaaactctgtctcaataaataaataaataaagtaaccaagaagctaaatttttaaaaatctgaagcatctcctggatttgacaattacagggcactggcaaccattgtgagaggtggtggcctgagctggataacctgagtctgttcctgctctgagctctaggatgctgacctggatgggcagtgtcagcagattccctggttttctggattctgggctgggcttggccaatggagaatactggcaggacgtgagagggaaggaggaaggaaagggtgaagtatcgattcgccttgcttccttgaggtgagggttccccgggctggctgcattccttgatgaaggccaccattcctgttgggtggctctctccacacagtgccacctgtaaagactcttcccccttttcctgcagacctggggtagtgcagcttcctcctcttaccagcccctgcaatgccacactattcttttgacttttctctatcttgtcagcatctttgtaaatagaccttctactaaaccctcctcaaattactcaatgtagtctgggcaccgtggttcatgcctgtaatcccagcactttgggagaccaaggtgagaggatcgcttgagcccaggagtttgaaagcagcctggacaagatagggagacgccatctctaaaaaaattaaaaaaaaaaaattagccaggtgtggtggcatgcacctataacagtctcagctattcgggaggctgaggtgggaagattgctggagcctgggagaccaagactgcagtgagccgtgatggtgccactgcactttagtctgggtgacagagtgagatcctgtctaaaaaaaaaaacccaatttaagtgtgccttttgtttcctgctgggatccagactgatacagggctcagtccaaactgaagtgggttggggaaggagtgggagagtagggaatataaaacgttattttgaagagtaccatagaaaagtacagacagtaatagaaatctacaccagaatttaaaaaaggagattttatcattttgcttcagatttttttttttttggaaagacagaatactaaagatgaggtttcttttggtttctgtcacaacgtctgtctcctctatctctcaacagagagtgaattaggtatgaacctcattaggtatgaacccttctagtccatttttgataatttactgttagtatgtgttttcgaatttatctaaatgcttccatactgtatatatcattcagcagctccctcaaacccttttttttttagacagaatctcgctctgtctcccaggctggagtgcagtggcatgatctcaactaactgcaatctctacctcccaagttcaagcgattctctcacctcagcctcccaagtagcagagactgcaggcgcgcaccaccacacccagctaattttttgtacttttagtagagacagggttttgctgtgttggccagactggtctcaaactcatgacctcaagtgatccgcctgcctcggcctcccaaagtgctgggattacaggtgtgagccacagcacctggcccctgctttttttttaactacacttttttgtttttgtcttttttttttttttgagatcacgtctcactctgtcacccaggctggagtgcagtggcgcaatctccactcactgcaaccaccacctcccaggttcaagaaattctcatgcctcagcctcctgagtagctggtattacaggtgtgcgccactgtgcccagctaatttttgtatttttagtaaagatgggatttcaccatgttggccaggctggtctcgaattcctggcctcaagtgatccaccttcctcggcctcccaaagtgctgggattacaggcatgagccactgcacctggccagaactacacttttgagaactatccatgttggtatttacagagctaggccatttgttttaactgttgtatagtatgttttattatatcttattttatttatttgttctcctattaatgaatatttttataattccaattttccactattataaacaatgctgcaataaaaatctctatacctttctcctgatgtatgagtgtttctccaccatctatacacagaagagaaattgctgatcatggggtttgtgcatttaaactttactagatattaccagattgacattcatccatagaccctggtaagtagttctacagactcccacaaacagtaggtgtaaattctcatttccttgttccgtgttcaacattttatattgtcagagtttgtggtttttgaaaatgtgatgattataaaatggtatgcaactcatgttattaaacattaatataattttggagtagataatacatgcacacagtataaaattcagaagctacaggagcatatacaatggaaagcaagtcctccctcagcccctgccctctagcccctgtcttagttcgtttgtgcaaaataccatagaccgggtaattcacaaacaatagaaatttatttctcatggttctggaggctgggaagtcccagatcaaggcataagcaggtttggcatctgataagggtttgatctctgcttccaagctggtgccttgttgctgcatcctctggagaggaggaacagtgtgtcctcgtgtgagacagagacagagggcaagaaagggtcaagctctgtgtgaagcctcttttataaagaccttaatcccattcatgagggaagaaccctcatgacctgattacctcctaaaagtccccatgcctttaaagtcaccacgataaggatcaagtttcaacatgaaatttggagggaacaccatcattcaaaccataaccaccacttagttctctgttctgttgtctgtttcttgtgtgctcttcagatacattttatgcagttacatgtgtgtagtaaaacattaaactttttctatcccatttctttcgtctcagtagattatacagctttatagattcaatgttaattgttttcatttcatacatgaactctattttcttagatccaacaagcacaggtttgggtgactacttggaaaaagctcacaatccctaaagtcaagaaccatcaattccaaaggtaccattgcaactgctctaagggacttaggggacctctacctcaagtttcactctcctagaatttccagtggaagcttgcagactaggtccttttatctgctatggtacagtcagaaaaacagatacccctctaggtatctcagatagaaggaggcttatacagggaattagaggcttaaataactctaggaaagctgcaagagtgatagtgatcgggacacctctttcaggaaatctggtagtgcaggaatcacaaggaagccactgccattgctctcagctgcctgtagagccagttggagtattttcaggagaacacccaaaagttttaggcaaaattccatgtcagccatctgctgctgcctcaagaaaacaatggcttctccttttcttcccaaccaaatctcatgcaagtgcctctcattggtggagtccgggctgaatactgttggcaagatcagggaaatgtagtttccaagtttgtcgtcctgtagaaaaagacaagagtccagaaaggcagatgtggtactgagtacccacaaatggcaactggcagggttcccagtaacaatctccctctccctgcttacaaacatgattttattacccaactttgtaatatttcattctgtctctattaggggcatatattacataatttatgttacaggttttatatagatcaacaacaattaagcacctattttatcctccacattgcctactttgtggaagacttagggaagagtaacacaaaagggaaaagatagagttcctattgttaagaaaccaagtgtcacttactaaaaagctttcacggagaccctactgtgtgctcacatcggaaaccctaggaaagcagactgatatggactcatacagtcgagagacaaaaatctgcataggaatgataacaaccaaattcaacatagagattaccaatagggagggaaggaacacaggcagctacaattgtgtaagtcatattttaaactggatggagtgtacacatttgtgtattttatttttatttatattttttcctctggccaaaatatttcataataaaactttttttttaaagaactaggcagggtctctgtccttagggagtttacattttgatgagagaggtctctctctctctgtctctctctctctctcacacacacacacaaacacacacacacacacacacacacacacacacacacacacacacacaagaaatgggcaaagatatagcatcgagctgctgtcttgggtagaagagcatcctgggaacccatctttatggagttcatcaatgagatcagaagagaaattatatatgaattctgttaaaaaggtaaatttaatgttggtgtagactttcatctttaatcaaggtaattgaatatgccccccgaagttcatgtgttgaaacataatccccaaagcaacagtgtttggaggtgaagcctaatgggaggtgcttaggtcatgaggtctctgccctcatgaatatgtcattattttaagagtgggtttattataaaagtgagttcgactctctctctctctgactctctctaactttctatctctctctctctcactctttctctctctctcgtgtgtgctcctgcccttccaccttctgccgtgggatgactcagcaagaaggccctcaccagattcagtgccttgatcttggacttctcaacctctagaaccatgagccaaatcaatttattttcattataaactactgagtctttggtattctgttacagcaccacaaaacagattaagacattgatgatacttaacgtctttcttgttttgcaagggaagacagaataaagttaatgctccacctcatgctgactttcaataattctatatccaacagaacactctatagactgcagatgcaagtgtgaagggaaatgagataaggtagtgagcagcatgaggtaaagggcaggttggttttgaggcaggcttccattgggcaggaagctggaaatgagatgtagggtttagaacagtaaaaagaaggggaaagaaaaggggaggaaaagacaaggattcaaaattcacttaaaattaagactatacattaggtgtcatggagagttcaaaaacaataagacatgtcccctgacctcaaggaacttagagaagcatttgcccgaaggctcagaatgctcataataggctgggtgcagtggttcatgcctgtaatcccagcactttgggaggccaaggaggagtcagtcaggctgaggtcaggggttcaagactaccctggccaacatgaccaaaccccatctctattaaaaatacaaaaaagttagccaggcatggtggcacatgcctgtagtctcagctactcaggaggctgaggcagggggaatgcttgaactgagaggcagaggttgcagtgggccaagattgtgccactgcactccatcctgggtgacagagcaatacggtcttaaaaaaaaaaaaaccaaaaaaaaaaaactcacaatggtactcagtgagccatgcgctttacaaggatgctcttatttaattcacacactaacccggtgaggtcagctctcctaagcccatgtttcaggggaagaaactgaacacagagcagttctgtaacttgctcccctgcagcaaggggcagaagtagcaccattcttaactgttgcccttgccaggcctgagagatttcagtggacaatggaagtgatgaagtctcctggaaatatttgtctctagaaaagaggcataattcattcctcagccccccttcccaggtgccacaggtatattttttgactctactatttttttaaaccacatttccttcttctcctgccctccctaattcctctcttcatgcctgtcttctctttctgtcccagtctttcccaaagcctgcgataacatatattcagatagtaagctatgcttttagttttccaaattgtcttctttctttgcatccatgtttggaggaaacagaatatgtaaacccttaagactcttctcagactatgattttgccctcagtactgtatcattcccatcagcttaaaaatatagctcagtactctcatcttatagaaaaaagtagctatttttaaaaaaacctgtccttgatcccacatgttcctgcaaccctatttctctattctccatttatagcaagtcatcttataaaaagtctgtagccactgtcttcatttctcacctctcattctctcttcttcccacttcaactggctcctgtcccactctatgctgatatcttccaaatttatacttctagtcccaaccttccttcttaaccagctgcctccttcacatcgaatttggacatttaatatgcatttccaagtgaacatgccccaaggcaaatctttgcttccccagcccaacctactactctccagattctccttatctggcaagtagctctgcgacgggcctaagctgggagtctgcagaccacccattccctcagcccccaacactgaatccaccaggtgggatccaccccacctccagaatatcccaaatctgtctgcttctctccatctctgtcttcatccaagatgctatcacctcttactggaattacagttatagcctccttatataatccattctccacatggtagccagagtaatattttaaaatgcaaatcagataatatcactcctctgcgtaaaatccttccatatctttcctttgcgtttagcataaaatctgtccttcagggttctacatgatcaggtttctggtcctctctctgaccggatgacccctcccctgctcaccaagtcccggccatactttcaatcaatcctcccacctcagcctcctcagtagctgggaccacaggcgtatgccattaagcccacctaatttttgtattttttgtagagatggggtttcagcatgttgttcaggctgatctcaaactcctgggctcaagtgatcctcccaccttggcctcccaaggtgctaggattacaggcgtgagccactgcacccagccttgagatccttctgttcaatgagcacggcaagctttgaagctgctgttctaactgttctctcccacttcctggattatgaattccttggatcttccacaggtggcttcttcccaatatttgggcctcaaatatcaccttctcagccttccctcactagccaatttaactgaactactctcgattaccctgtcctcttttattttccaattaacacttattactacctgatgtgccattgttttgtgtgagtgtgttcatcatagaatgtaagctctgtgagaaccagaacctcgtcttttttgttttttgccacatgccctgtacctagcagggtgcctagtacacggtaggtactcaataaacgtttgttttaaaaattaatgaaatatgccaggcgcggtggctcacgcctgtaatcccaacactttgggaggctgaggcgggtggatcacgaggtcaggagatcaagaccatcctggctaacacggcgaaacgctgtctctactaaaaatacaaacaaaaaaattagccgggcgtagtggcgggtgcctgtagtcccagctactagggaggctgaggaaggagaatggtgtgaacccgggagacggagcttgcagtgagccgagatcgcgccactgcactccagcctgggcgacagagtgagactccgtctcaaaaaaaaaaaatagtgaaataaattcatgaaagataagctccttgaagtctgggaccattatgactcataaatttctgtataacttttcccaactacctcatcacattgccacattatcttatgagttctcaaaatacggttcttgatgatgaagccatagacaacaaatttaccttaaaaatctaggaagagctaggtacggtggctcacacttgtaatctcagcattttgggaggctgaggcaggaggattgcttgagcccaggggtttgagaccagcctgggcaacatagtgggaccttgtctctacaaaaaataaaaaattagccgggcatggtggtacatgcctgtggtcgcggctactggggaggctgacgtgggaggattacttgggcccaggagttcaaggctgcagtgagccgtgattacaccactgcactttagcctgggtggcagagtgagatcctgtttagaaaaacaaaacaaaaagacaaaaatctgggaagacaaagggactgttctaactgttccctccctctccttggattatgaattccctggatctgccacagtgggcttcttcccaatatttgggcctcaaatgccacattcttggccttcctgcaccaccaaatttaaccgaactactctttatcaccctgtcctctgagacagggtgtcctgagatgaccttaatgtatgcttttattttaacgaaagtttctgatgaaaaatttgttgtgataaatctaacagttacaccaactcaatcccccaaatcttggaatctttcctgggtctggggtccaaatctttgaaccaatagtggttgacaagacccaaagccaaagcatttcctcacccccttagtcaatcaccctggtctccctttccccttttaccctctgaactctcggggcaatgagtatttaatggttttgaaaattcttcctttccatcaaggaacagtgttaataattccatcccctgaagaaatttccagggttttagagtcaatatgataaaacgccttttaaaagtgggctataggtgcttttctaaccactctgtgtaattctaatagattgcgtaattccttacaaaggtcctggatgctcaccacccacatctccagcctaaaactaggttatgagtaaaatgaaaactgcaaaaaaaaaaaaaaaaaaaaaaaactcttcaattttcaacttcccataaagtcctcagctcgttgcatacctcacaggcatggaaatccagattgtgcaaagaggtcaagaacctgaataattattccactcgtaaccaaacagtaatagacactccctttgaaattgtggaaattctcatttccacactaaagccaagggaacacagccgggatgtgatgtcagcaggcaagaagactgaaagtggactttgattaattacctgattggttcctgccccacttagacctgaatgaagcaagtctgccacattgaaaggtttggggaattttaggtggaagaggggtgggatgggacggagaggctttatctagtctgaaccattcatagtttgggaaagtgcccaagtgaaaacaattgaacaccaaatcattttcccacgaggctggcagagttcttcatagactatcaagtttcaactgctttgtaaactctatgaagacatctttaaggccctacatttttccccctggagaaatgtcttcactccaagaggttagcctaggaagatatcattatcttcaagccacaacaaccaatcccctaggccccccatcctgaaattcttgaaccctgtgctccaccctaactcagctcaggaaactgataagcagctgtaaaaatagacgtaaaacattctctcccattcaaatcagcgggcacagtttgcactttaaaaaaaatggggccaggaggttgttcttttccacttttaaaaaagttatggactaaaacacaactaagcaaccacatatattacaaagtgaatttgtctcctcattagctcttacgtagcttatatgtttgtatgtatgtattcatttaaaactctgttttatcaacattttaaaacatccacaaaggtagagagacttgtacattgaatataatacagactcaacacccagcttcaatgattatcaatgtaaattcattccattttaatgttcttctgattaaacacaaaatctcagagcacatattcagggcaacttaaatctatgctcctgggtttaaaaaaatatatatgcacacaaaagcttgccatgagaatgtatccatgtacaacatttaattttttataatacatattaatttctgtggagtttttggtcaaaagagtaaaacttcacaaattctgactaattagctacaaccctgtccaaactgttgaaaaagttgccttatatgactttttattatttatttattaatttttgagatagtgtcttgctctgtcgcccagcttggagtgcagtggcgtgatctcagctcactgtagcctctgcctgccaggttcaagcgattctcctgcctcagtgttccaagtagctgggattacaggtgtgcaccaccatgcccggctaatttttgtatttttagtagagatgaggtttcaccatgtgagccaagctggtcttgaactcctgacctcaggcgatctgcccaccttggcctcccaaagtgctggggttacaggtgtgagccactgcacccagccttatacaactttttaaaaggcaattttatcacttccaaatgataatatcataaaagtattgccaaggagagtttctgtcagatttgccttaataaacacacaaatggtaactataacattatgaattatctttgcatgcaaataggtgcttctaaataattaaagatatattaatcagcttgggctgccataacgaaataccatagactgtgtggcttaaacaacagagatgtatttttttcacagttctggagactggaagtctgagatcagggtgccagcagggtcagattctagtgggagctctcttcttgggttacagacagccaccttgtcactgtgtccttacaaggcagagagagagcaagctctctgatgtctcgtcttataaggatgcaaatggccaggcacaatggctcacacctgtaatcccggcactttgcagggctgaggtgggcagatcacttgagcttaggagttcaagaccagcctgggcaacatagccaaactctgtctctaataaaaattcaaaaattagccagttgtggtggtgcacctgtagtcccagctacttgggagactgagatgggaggatccattgagcctgggaggtcgaggctgcagcaagctatgattgtgctactgcactccatcctgggtgacagaatgagtccctgtctcaaaacaaaaaggggtggagcgctaatcccaacatgagggtcctacccttatgagctcatttaaacctacttacctcccaaaagccccatctccaaatactgtcacgttgggggttagagcttcaatgtgtgaattcgggggtatacaatttggttcctaataagctttagacaagttcatcacaaacatcacaaattccatattagagctaggggggatagctgctttcgctacaaacagtttagcttggagtttatagttaactatcaaagcttacctaataatgctcagcataaatgctaagatcttctgaaagtagaacacaaacctggcttgtgtttttttaaagatcagtgaatttttttattgacagaaattaggatgcttaccaagagacctggaaaaaatccaggctttcaaacttcccttggaatttgcaagtgggtaattcattattctgctcctgtcctgataagtcatggtttctgtggctgcccagctgttggtggctgaactctcccacaaaggtgaccccactgtaaaagtgaagtcatcgtgactgagcatggctgagaactccccttgggaggtgcaggggcattggttcttattataagaactctctgactggagatgaaagtgctttgggaacatggggccaaaccttttcaactaagagcaggaagatggtacttcatgaagggtatttgacttgccaacatcctgagatataacttaagaatgatctataactggctgggcgcggtggctcatgcctgtaatcccagcgcattaggaggctgaggtgggcggatcacctgaggttgggagtttgagaccagcctgaccaaaatggagaaacccctaaaaatacaaaaattagctgggtgtggtggcgcatgcctgtaatcccagcttctcgggaggctgaggcaggaaaattgcttgaacccaggaggtggagtttgcagtgagcagagatcgtgccattgttctccagcctgggcaacaagagcaaaactccacctcaaaataaaaaaataaaaaaataaatctataactcatcatagtgaaatatttttcttcttaaaatttattttccagtttttattttagaatcaaggggtacatgtgaaggtttgttacaaaggtatattgcatgatgctgaggtttagaatagaaatgaatctgtcacccactgggtagtgagcacagtacccaatagctagcttttcagcccttacctacctcccttgcttccccctctagtagtccccagtatccattgttcccatctctgtgtccccacatacccagtgtttagctcctacctataagtgagaacatgcagtatttggctttctgtttctgcattagtttgcttaggataatggccttcagatgcatccatgttgctgcaaaagacacgattttgtgctttttaatggctgcatagtattccatggtgtatatgtagcacattttctttatccagtctacatagtgaaatcttgtcttgatattctcctggaagctggaagcagatattgaaaatgagcatgcttagtttgaggagtagcaacaaattaactggactatagctcattatacatatacttattataccttatttatagtattactgcttgagggctaagattatgggcttgggaattcaggaagttctgaattcaaatcctgactccaacattagtagctatgtgaccttgggctaatttctaaatttccccattaaaaaaaagaaaatctctaaaatgaagataatactactacctaccttctctaagtggttataaggaataaataagataatgtatataagtagcttggcatagcatctggtatagagtaagagccaaataaatggtgagtactattatttgcccagcataattgaacttcaaccattataattaactacacttgtgaaatccgagtgaaagattgctttagttatcgcaacaacctgaaacaccttctccaagggagggaggtggtttttagaacttttctcagtgttagtttgcatatctttggggtattttaaaaggtgctaaacagtatttgttagcactttacagtatccttctggttcataggatttttgtagcttatttgccacttacataagaagctgtgtcttctttaagtcccattttgcaggaaatagtggggctatttaccacgtacttttcagaaataagttaagcagtaagaaattcaggcaaggttctggggatacatatacagcacaacaacataaataaggggtctccatgtaatatacaataccactaaaaataatagtttacttccccagtggcatagaaggtgcctgaatgggcttctctgattattgcaatcatagtgacaagaccagcttgagctgtcaggagccctggggtgtacccagtgagatggcccagcctagattggcctctatttcccatttattgtgaggaatgcagcgtttgccttggtgagtgtgaaattcatctgtcgatttcgaggggaaagctggaggccgaagattaagtgagaagacaaaaatctttcggcaaaacattgtgaagtggtaatacagcaataatgctctcgagtctcatttcccaccagtgaggtgcttgagaatagtgggtctgattaagacagagaaaaaatgtgccagaaaataaaaagtggaaatcttgctttgtggtctctttgctcgctgcaaaaattttctgagtactaagagcaacgaagggttggtggaacattctgtatttatgaatcgtgtaaatcaaatcttattaattgaattctaaaacaacggggtgattagaaaattatggaggaaaatgcttcatcagtgtgaagccttgccagctgctgcattggtgtcgtaacacatgccttggtagaattacggcattctggtgccaggagtgtcccagttaatcagatctgttaggatattggacaaccgtgcaagcttggtgggcctgtgactatgtgttcagattcctttgtcctaatggttatcacacagtatttctgtctttaatactataacaaccccttctaaaggtgaataaaaattctctattgatgcttaacgtttgcggaaattattttgagtataattttttttttttttttttttgagacagggtctcaatctgccatccaggctggaatgcaatggtgcagtcttggctcactgcaacctccgcctcctgggttcaagcgattctcttgcctcagtctcccgagtagctgggattacaggcgcctgccgccacgcccagctaatttttgtatttttagtagagacggggtttcaccatgttgccaggctggcctcaaactcgtgacctcaggtgacccgcccacctcagactcccaatattttgaatttaacattatcttaaaatgctattttaagataatgagaaatattatcttaaatttatttaagaaatttatttaagaaatttatttaagaaataaaaccaggtacaaaatcctagtatttacagttcttatcaaccaaaggcttttttgtttcagattaaatttaaacagaattatggagccagtgatatttaaattgacaatactaatttaaggagatggatgatgttattttgctgaactaagtaactgattacaacataaacatggtactactgattgccacagggcaagttcttttgattttggtgcatttataaaacgacttctctcaactttttttaatttgaactttgagattaccttaattaatatggtagcaatgcatcattcacatacggtggccaactctgctcttttctcatttgccagggacaactggggaatgctatgctatgccaatttgatcacaaacacaatgcaaatgtgagttaactcatgaggcagtgctcagttatgaagtagtcatcttgtttttgttttgttttttgagatggagtctcgctctgtcacccaggctggagtgcagtggcacgatctcggctcactgcaagctctgcctcctgggttcatgcgattctcctgcctcagcctccggagtagctgggatcacaggcgcccacgaccatgcccagctaatttttgcatttttagtagagacggggtttcaccacgttgggccaggctcgtcttgaactcctgacctcaaatgatccaaccgcctcggcctcccaaagtgctgggattataggcgtgagccaccgtgcacggcctgtcatcttgttcttaatgaaatgttctatggtagcccttcaccgacatggctgttgagcacttaaaggggacaactgcaaacaggaacagaatttttagttaatttccatttaagtagccactttgtgactaatggctactgtgctggatagtgcagaatcctagttcatacatttattatgtttttttttagatgctcgttgaaataaaatcaccagctgtgtgagtagggcaatgtatttaacctttctaaccctccgagcttttatctgtaaattggggatgacgagatataacacatttaatcacttagcatagtgcctggacaggaacagcacacaacctccagtgttgcaaatgggtgatgggcctgggggagggtctgtcctcatcaaagtttccattactgcttcctcaagccactcctgggcatgcttattttttgaaatacatgattgacgttttctccagcttatctgaagtgttattaaaggcctctttagatagtgttgcaattttgattaatctataacaggtaaactaaataaaaagagtgtgtttaccatgcaaatgtagtttccattagtcacttgccacgtagccttctgccttcctattagattaccccctacccaccacctccagtgagctgcttctgatctcagataactgtcatagatgcattgaacagccagggcatttaggacctcatcttgatttgtctggaaagcaggaagcctaaatccccttcaggctgtgggggaacagtatgaaacaggctgttacactgtcccctctgcttctgctcctgtggggttgctcttccactccccaggcccaatttacaaccccactttctgactggcaaacaccctgcattatttttcagaatctgctcaagcttcccctcatctacagaatctttcctgaccctccaagataaaatggatctcctctatgcttgccttcaccctgtatcttacataggcttccatcacagctgccgtaatttttcgtatttattcttaccttatgttatggatagcgttgtgtcccccagaaagacatgctgaagtcttaactccaaaaacctcagaatgggaccttatttggaaatagagtctttgcagatataattatgtagttaatgacaccagtaatactgcagtagggttaatgatacctgtaatactggagcagggttggcccttaatccgatatgactggtgtccttataagaagagaagagtcacacacatggatgcacaaggggagaatgccatgtgacaatggaggcagaaatggaagagctgcaactgtaagctagggaatgccaagaattgcagagaaagcaccagaagctaggaagatgcgagaaaggattctcacttccaggtttcagagggagcatggccctggggacaccttgatgtcagaattcttgcctctagaaccttgagacaatgaatttctgtttttttaagccacccagtttgtggtacgttgttaaggcagtcctaggaaaccaatacacctaactagaccataagttccttagaaacaaagaccttgtttgatttatttatgtggtcttggcagttgttgcagtgtctgaaccagtaagagggatcggcaaacctggctgaatggataaatgaatgaacacggaacctgttcttttgccttaacctggtcttaaattggaactgccaaaaaattactttaaatcttttttctttccttttttttgagatggagtcttgctctgtcgcctaggctgcagtgcagtggctcattgcaacctctgcctcccagattcaagtgattctcctgccttagcctcccaagtagctgggattacaggcacctgctatcatacccagctaatttttgtatttttagtagagacggggtttcactgtgttggccaggttgatctcgaactcctgacctcaggtgatctgcctgcctcagcctccaaaatgctgggattacaggtgtggccgctcctggccaaattactttaaatctattcagtgctactgcatatggccacacaggctaggcactgcatgattctagagttgtgcaatgaggtgaccttcaattatttgtcactgtataacttgatctacataaagaaaatcaacagtacagtgaaccaccatgccatctgttagaaaaaccactaccgttgggagattcagctcttactcacccagccaaatagcaggagccataagtagttatcctctagggcaggctttggtaaactacggacctctggccaagcccagcctacagcctgtttttgtaaataaagttttactaaaacacaaccatgctcagtaatttacatactgtctatggctgctttagtgctgcagtgagagagctgaatggttgtgatgaacagtggatgtgctggagcctataaagcctaaactatttaccatcaagccccttacagataaagtttgctgagccctgctctagatgatttaaattagtagatattgccagaatgtttcacattaagtgataaagatcccactttgaaactgaaaccacccattttatcacacattagaagattctacactactagcgttaatgtagacgtgccaaaaagaaaattatgtgtagaaaataatgtatttcttcctcagaatgggaggcaggggttagaaataaaagagtgtgagagcttatttatgtgtatatgtgaataggaaggtgtaggtggagtaaattccaagcaaaaacataacatatgcaacttacacaattaggtgctctatataggaaatgttttgaactgtgtccagttacccaaattggaaagaagcgagagctggagaaatggatagagacctattatgaagtccgggaggagaaatgtttatgagaaaagtgctgcctgcagtttttttccttctggaaggtattgtggaaagtcttagaccttcctgagcagtaccttgcatcaggtacatgctgccatgtgatcccatcacccaggcctcaactgattgggccaaagctggatgcttgatccaaaggtcaaaggcctgtggaaaacctggtacaagggctctgcccagtaggagtggatactggccacaccaaccacatgttttctcctggggagtttgaactagaagcctatggagacatcagcaaatctatgtatattatatttcaagaatgtttcacattaagtgataataatatattgatatataatatatatcaagatttgcaaatattatatatcaagattagcaaaagcagaaacagagtagttgtcactacaatgacagggcaattgttacctaagaggataagtagaaaacctggtcataaaagtgacattgtgtcctgcatgatgctgccgtttccagaggtctgaccttgccatgggggctgtatcattaatcacgacccagtttgttcctttctttgagacagggtctcagtctattgccaagcctggagtgcggtggcatgatcatggcttactgcagcctcaacccccggggctcaagtgatcctcctgcctcagcctcccaagtaactgggaccacagtcacgtgccactacacccagctaattttaaattttttgtagagacaaggtctcactatgttacccaggctggtctcaaactcctgggctcaagtgatcctctcacctcagccttccaaagtgctgagattataggcaagagccaccaagcctggtctattctatttttgctgctgttcagggatgggtttagttcatagtcagctaagttttcctcttttatcacttcagccatgctcttcccatcctctgttcccgtaactctctgtcttttatctgcaggtgccttacaaactctaaccttcaaccaaccccgccatgtatttctcttcttctacatgtgggtggtttagggctgcaggaaaacatattacccacccactgtgtgggtggcattgtgagtgcatggcttctaacctcagcgggacctgcttgtctatttggaagttcctttatgtgtctgtatttggctccctctactattcctcacggctggtattgtaaagtttcagcactctccaggcttccgtcttggcccactgcaacctccgcctcccaggttcaagagattctcgtgcctcagcctcctgagtgactgggattacaagcatgcaccaccatgcccagttaatttgttgtatttttagtagagatggtgttttgctacgttggccaggtggtcttgaactcctggcctcaagtgatctgcccgcccctgcctcccaaagtgctgggattacaggtgtgagccatcaaccctgaccaggcttccattttcatggcttacctcgaatccgatctcagagaactgaatcctcaatttccggactccctccagcaacttatagaaacctgtaccctttctttcctgctttcctgtttctaaggaaaaggtactgcttcttctgttcaaagctaatccttccagctgcgctctagattccaagatctattcttgattccaaccttgttcccatgcagttattccctctcattcttacatctgccatttcttcctggtccatgctttctttccttcagattatgtacaagttcatcctcctctttaaaatgcccttttttgaccctttataacctactagctagcatcttactgaactcattcattttaaagctgctcatcttaaaaggtatagaaaattctggaaatttaatatggagaactgaagtgatttaagagaaccccatctcccagttcaagtacatagaaatgctgcttaaaatataacaagcttttaaattttaaataaataatggagttcaaattgagtaacaggtgtctccaggtcctagaaatgaaagaagttttaaaaaccagaatgagagagaaccaaaagcaaatggctgttgggatgttggagtctgaaataggtcttactggttggaagctggggttccaacagcagcatgaggagcagagtgtaggtttcagaacccatgttgagggagagtgagcctcagcgaccaacatccagctccaatctcaaagatctgcagcatgtacaaaatgggagctacaaaaattcctctaaccagcctctgaaagtgttagccaagctggatatcaacttgaggcaacatatgggaaaagatttatcaatgagaaagcaaaactcaaggccaccctacccatcaatggagtgttggacctgaactcacacctcccatgtggtgctgtgatcctagctgaggcattaacatgaacacttatccagaacaagtgatacccaagggccttctgcagaggcaaatgcaaaactgccctgtagggacattcctataacccagggcatatgggaccatcctcattgaagataagcttagaataaaaatttgtaaactaggcaagaaaaaaaatcatttcaagagttagcatgaaccattcagaagaggatttgcactcttttttttttttgagacagaggctcactctgttgcccaggctggagtgcagtggcatgatcttggctcactgcaatctctgccttccagattcaagtgattctcctgcctcagcctcccaagtagctgggattacaggtgcctgccaccacactcagctgatttttgtatttttagtagaaacggcggtttcaccgtgttgaccaggctggcctcgagattcacactcagaactagaaataatagcccaatctgaaagaaactttcaaatgtttaaaaatataatagaaatataaaggaaaaatagtgtctattaggcaacaaagggacagtattaaagaagagcaggtgaatctgaaaaaaaactctagaaatgaaaactagtttttgaaaattaaaactcagtggttggttaatagtagtctggacatagctgaaaagaaaagccatcaattatctaagaaatgcagctcagaaaaagataaaggaataatgtgaaggagcagttgggggtcatggaggacagaatgaaagggttcaaggtgcatctcattgagttccagaaggagagtgtgatatccttattgctgactttcaaatattttctgctatccctctggacacatgggatatttgtgtacttcctcaccacctggaacttaggtgtggtcatgtgacttactttagtcaatgcaatgtgagcggaagtgatacatgtctcttctgggcaggtgattgaagactcatgcacacaggaagctgaggcaggaggattgcctgagtccaggagttcgaggctgcaatgagttatgatcttgcaccactgcactccagcctgggtgacagagagtgagcatgcctctaaaaaaataaaaaatagaaagactcaatgcacaattcataacactcttattttattttattattaattaattaattaattaattaattttttacttctgccaaggcaaccagcagcattccaggtggtggtggttctgtcaactgaatttcagactaaaggcaacacagggcagagtccacccctaatagacatgtagcaaatgtgaggaataaatcttattgttttaaactataaagatagtgagattgtttgttctgcagtataagatagtccatcttgactgatatagggaaaatggcaagcagagatgacagacatcaaagagctaatacacttttcagaattaaaaaatgatacgagtctttggattaaatgaaaatattgagtcctgagtaagacaaaaacaaatccacaatcagacgcaacatattgaaactgccaaacataaaagcatacttcatctagttaaatcctcatcataactctattacatcatattaccactcacatattatatgtgaagaagccaaataagtctgttttatggctgcagagagaggaaggtatagaagcagaattcaaacttaaatctgtctcccaaagcccatcctttcccaaatctcatttgaaatttcattttcactttacaacattcctgtaaaatgacttattttcccactttatagataagaaaactgaggctcatcaatgttagatgacttgtccaagcacataaaaccataaatggtggggctgaggtttgaactcaagtcttgttggcttcgaagcccagacttttttttttttctatgtcatactgccttccataatttctctagaatttagcttacatattgttatcattaaattttccacgtttactctccaaccacagtggtcttcctgctcctcctagaacacaccaggtatgctttagcctgaagtctgcctttgctattcttctgcctagaatgttcatttcccagacagcacaatgactctccattcaggtttcagttcaaattctttttgttttgttttgttttgtttttgacacagggtctcactctgtcacccaggctggagtgcagtagcacaatcatggctcactgcagtcttgacctcctggcctcaagcaattctcccacctcagcctcctgagtagctgggactataggtgcacaccaccatgcctggctaatttttttttttttttggtatttttttgtagagccaggttttcaccatgttgcctagactggtcttaaactcctgagctcaagtgatcctcctgcctcagcctcccaaagtgctgggattacctggctaaattctatcttgataggctggccttccctgaccaccttcatccctaatgttccatcatcttaccctgctttattttcttcataggtagtatatttatccagcattatcaatcaacatatttatgtgcttattgtctgtctctccctctctagtaaaagctgcttgagagtggattctttattttgttatatttcctcaattgctcaataaatatttgttggatgaatgaatgaacaaattagccacagagtgtctgctcttagcactactgaacctcataagaataacaggaaataaagaccctgggacacatgggagagcagacctcatcacaaagcagggctagacatgaggcagcctagcagcaaaggcaaggcattatctacaccccagccttttcattcaaagaacacctaatgctctttattttattttttatttttatgtgtttattttttgagacggagtctcaccctgtcgcccaggctggagtgcagtggcaagatttcagctcactgcaacctctgcctcctgggttcaagtgattctcctgcctcagcctcctgcgtagctgggattataggcacacgccaccatgcccagctaatttttgtatttttagtagagacgggatttccccatgttggccaggctggtctcgaactcctgacctcaggtgatccacccacctcagcctcccaaagtgctgggattacaggcgtgagccaccgtgcctggcccttttatttttttgagactgagtctcactctatcacccaggctggagtgctgtggcacgatgtcggctcactgcaacctccgcctcccaggtttaagtgattctcctgcctcagcctcctgagtagctgggattacaggtgcctgtcaccatgccctgctaatttttgtatttttagtagagacggggtttcaccctgttggccaggctggtcttgaacttctgacttcaagtgatttgcctgcctcagcctcccaaagtgctgggattacagggtgtgagccactgtgcccggcctgccctttactttaaatgccccacacatggtcatatgaagagattggtttaccttacccacctttgactttacagtctgatccttttcccctaataccttagtattcactcactgggtcaacagtacttcttcctatgagagggtgagtccacaaagggctgctctgtcattctccaccatgtgtacacctatattttctccttttctttccttttctactcttccatgcagcaacaactctgtgaggtagatattatgacctctccctggcttcatttcatagatgagaaaacctcagctcagagaagctaagggatttatccaagatcacacagctgttaggagcccaagcttggatttgaacttaggatggatggtgttatgggttgttttccccccaaaagatatggtgaaatcctaaccatccaataccccagaatgtgatggaatgtgatccagtcatggaatagaaatagggtagttgctgatgtaattagtaaaggtgaggttatactggagcagggtcagtccctaatccaatatgatggtgtccttacaaaaagaacactatggctgggcgcggtggctcacacctgtaatcccatcactttgggaggccgaggcgggcagatcacctaaggtcaggagttcaagacaagcctgaccaatatactgaaaccccatctctactaaaaatacaaaagttagtcaggcatgatggtgggtgcctgtaatcccagctacttaggaggctgagacaggagaattgcttgaacctgggaggtggaagttgcagtgagctgagatcacatcactgcactccagcctgggcaacagagcgagactctgtctcaaaaaaaaaaggaaaaaagaaaagaacactaagtgaagtgacagggacgcatggcgagtaccacgtgataatagaggatgagaggcccagaagcaccaaggatggcaggcaaacccccagaagccaggaaaaggcaaggaaggattcaccaacaggtgtcacagggggtatggccaaacttccagcctccagaacagacataaatttgtgtcattcgaaactacccagtttgtggtgccttgttacagcagccctaggaaaccactgcaggtggtgaagccatctttcctctgtgccacaccatcttccaactttgggacagagttgacttatatggcatgagctgagaaggaatgcatgccaaaagggtctgcagacttcacttcatctgaaataccaaaaacagaaccaggaagtgcctaaaccatcttattcacattgatatcagtgaatatgaagaagttaagtccctcaattgtcttgggacaagctggctcaccaggtagaggacaccagagaaaatgagctattcccccagacgcctcctcaacaggtgtttgttactgccttcctcccaatccccaatttaggctgatacctaggcacctccctaattatacgcaagatgctttcctcttctgttcttttttcttctcctcttccccaactccaacttaccgctactgtgtttcttcaagttttccgtggttttgccttaaatctggcagtggcatcaaaaagcattcctttaatcccactggaagaaaaccgaataccaaaatatctgatccctgctccgctacttcagtgcacatggattcctttgaacaatgttaccactctccctggtgatgctgtcagggcagggagttggggatggagaaggcagagagagacaggattggtgcagcaaggaggagactcgagagggtagaaaggcacaggacagtagatatggacatgggtgtctgagggtcgccagcccttcctccttgaatagatgttctgaagcctcatgacccttaggaaataagcattttccggtattctattgctttttgctctgaatctttggtattctgatttttagaagtggaaaaaatattttgatttaagccatatggtcttttcctccttccactggagctgtaggaaactcacaggggcaggtgtggaaagcagcggcagcagggtgggtgggtacataggctccatgtgtctacagcttgtgcaattctgtagctatggcaaccgtgtgcaatgccactcgtgtagcctcataacacggcccgagagttacccctggctcctcaactattcctcttcaatgcactatctgtgctgctgtttcctagctaccatcgctatgttagattttttttttgaagtcgtgctcaagtattgtttctgtctgctatgcttgttgtcactgcaccttagttcatctgatagcacaagtagatagcaaacccaaaacccatttcttacagatactgttggttgttaacaattgtctgcattttttttttttttttgagacagagtcttgctctgttgcccaggctggaatgcagtggcgcgatctcagctcactgcaacctctgcctcccaggttcaagcagttcaagcgattctcctgcctcagcctcccgagtagctgggattacaggcgcccaccatcatgccaagctaatttttctattttttgtagagaggggttttcaccatgttggccagtctagtctcgaactcctgacctcaagtgatccgcctgccttgacctcccaaagtgctgggattacaggcgtgagccactgctcctgcccaattgtctgtacttaaacacgttgtgttagaaagattcttgaggccgtggtctgaatgagatgaccccttgagactttttctagttctgccagtccatgctgggtgggctctgtcagagctaatgatactatcaattgactgcctgcctactgaaaatctgttttttttttgttttgtttttttgtttttgccagttgttacaatttcctgacaacaacaagagcagtaaaattaaagtaaaatttatagcaatatatgcaaatatatcatatcctatgaagattgtacatgagtaatgtatgcatatgtaccacataaaagaaagctgcattgtgttaattctgagaatatatgcacaaatggtttcttttatttattgttaaaaaccatctccaaatgctcagaaatatttctgttgtaattaaatttaaatgtttttttaaaaattcatgggagttggtaatttactatgttcatattttagtttccttatgtttggtcattaagagcggtatcataaacagctaagatttaaggcccttcaccttcctgggcttcaacagaagcaggatgtcaacacccataagttacaagcagtctccccaagggactgtaatacaaaatacacttacaattgaattaacttgggagaggattctgggaagctgacagcatcagcagcatagtttttcattctttctaaatccttgcataaaaaaaagagagatcaattagatagaaaaaccaaaaatccatgagcagcgtttactgcaaaactaggtgacaagtgagccccgcaaaatacaagtgggcagagataaaccaccaacagttacaagacatgcagggtatcagtgtctgtgtgggaaaaagaataaaggagctgcatctgacaggcctgagaacaggaggaccccaaaatagccaacaggcattcactggagagacgtcaggcccatctgagagaacagcagctgaaactggtagggctttggtccaataccaatgtcaagcccatggggactaagtctgaaggggctgtagatgcctagctcctctgaactctcaaaatcaacctgccaggtcccctttgccagacagagactcacactaaagataagttgcttggggtggaataaaaattgaacaggacatggacaaaagatgagggaaagaaaagctccacgccaaaatagtgaaatatcataaagcaagctgccttatgttttaacactcctccaaatcaagagagggagttctgtgaactaagagaagttttttcaatgcaattttacaacaaaagttcagaaaaactaattttacatgaaaagaagcaacagaatacaaaaaattagccaggcgtggtggtgcatgcctgtagtctcagctactcgggaggcacaagaatcacttgaacccgggaggcagaggttgcagtgagccgagattgttgccactacactccagcctgggcaacagagtgagactcttctcaaaataaataaatagaccgggtgtggtggctcatgcctgtaatcccagcgctttgggaggccaaggtgggcggatcacccgaggtcaggagttcaagaccagcctggtcaacatggtgaaacctcgtctctactaaaaatacaaaatattagctgggcatggtagcagacacctgtaatcccagctactcgggaggctgaggcaggagaatcgcttgaacctgggaggcagaggttgcagtgagcctgggcgacagagtgagactccatctcaaaaaaaaaaaaaaatgaaggggagcatatacaaaaattttaaaaatgttttcattagtaattttggtaatagtatttttattctgagattgttgtatatttaacaggaaatgagacaatgagtaattgtggggtattctcattctataaacctctatctccttgagatagggcttcttggtgtggaagaaaggggatacagatagaatagagaagagattaagagaaagctccatgaggcagggcacggtggctcatacctgtaatcccagcactttgagaagctgaggtaggaggactgtttgagctcagagttccagaccagcctgggcaacatagcaagaccctgcctctaaaaagaaaaagaagagaggaaagctctgtggtcttgaatttgaattggaattatcaatataaactcatgaggtattttatctttaaatatatatatttgtgtgtgtgtatgtgcatttcctttttctgtccattgaaaatactgtccattctgtctattgaaaacaatggccaatcattgaaaacaatgcccaatccagcaccaagaaatatccctaatccccagaatgtgttcttgaaatatcatttctccttaaaagaaatcagtgcatcttggagagatggctgattccaggactagggtgggaaatttacaaaatgaatcttttgtcaaactagatagcaaggaagttatcaaaggtgaccagaattgtgtcaaaagtatgaaggagccaagattaagcagttcctactggccaaagacagagcaatttgagtttcatgaaataataataatttcaataaattaaaagccatcaaatatgtttaaaccactgagttcagaatgagatttccaaagagaaaatgcttaccttcggggataatggagaactaattcattattttgaaatctggtaaacaaggggaaagaatcacacatttgtcttgcctttcctattatcactgggtaaccaaataatagataaggagaagtgcctccttataatagttttccaaataaaaaataaaaaagataggattataatatcaccattttgtaatcccagtgaattaaaagatataagtattaagcttcaacagctgctaatgtcatggaagataaataaccagacatgaggtgctttctattgccttgccagacaccaattccttggcaacgtccctaaaagagaaatatcaaacaccatgtaactactatagttttgacagtcactttggaaagaaatagaacttgagtctgctccagtctctggatctagcagccaaatttcaggaaatgcagagaacagaggaacatgctaaatctcaccacaagtgcacaatcagcaaaattcagactgtgggaaactctccagacaaaagagcctggtaagttgtaaggaaaagaaagggatagaggagaataaatagcttaaaagagagtttaaaaacatatcactttttttttttaatggacaagactaaactacagtgtctaggaatgcacatttgagtaaaaacaattatgacagtgcaagaaggtgatttctataaaagtcaggacaatggttacttatgagaggagagtggggcttgtgactcaaactggacacatggaaggggattctggagtaggggataaagttctatttcttgatcttagtggggtttcaaggatatttgctgtataaaaactcattttactgtatattttatgtgattttatgtatctttattttattttatatcagaaagatgtttttgagaagacaaggatcaagctttgtattttttttatttattttcaaaattgacaacaaaactcttttgatgtacaattctgagttttcacaaacatatatagtcatataatcaaaaccacaatcaagatataaaacagtttcatcacttcaaaacattcccttttgccccttttagtcaactcctccctccattccaaaccatggcaaccactaaacataccattttctgttcctatactttcagttttccagaacatcataaaaatggaaacataagatatgtatgtagccttttgagtctggtttgtttcacttggcataatgctttgaggttcatcaaagttagaaaacttatcaaagttcctttttactgctaagtagtattctgttgtatggatgcagctcaatgtgcttatccatttaacaaaaggacatttgggttgtttccagttttggccattgtgaatgaacaaagctgctataaacatttgtatacaatgtgaaaataagatttcatttctcttgaatagatacctagaagtgaaattgctggtttataggttaagtgcacgtttaactatatgagaaattgtcaaactatattccaaagtgaccatactattttgcattcttacaggcaatatatgagttcccattgctctatgtcttcaccagcacttggtattgtcattttaaagccattctaatacatgtgtagtggtatgttatcatagttttaatttgtacttccttaatgactttcatgtgttaaatatatgaaaggatgctcatttgccatctgtatatcttctttggtaaaatgcctactcaaatgtttgcccactcttttaaagcaaactattggttttcttattgttgagttgtgagagttctttatgatccctttctctattgaattgcttttgtaccttggtcaaaagtcaattggccacatatgtgtgggtctattctggacttcttattgtgttccattgatctatgtttctatcctttcaccagtaccatactatgttgaacactgtgactttatattaaattttaaaatcaagtagtatgaatattctaattttgttattatttttcagaattgttttggctattctagttccatcgtctttccattcatttcagaaataggttgtcaacatataccagaaagagagagagagagattttttaaattaattaagggagctaagattttccctatttctaaattgatagctttacttctgcttctggttatgagtaactcttcttgttgagaacagcaataaaacttggttaaaacacaaaaccatagctctttcagagagtaagcaaggtagtcagaacttcaggatcataaaatccttaagaaaagggaataatagcagaggagtgagcctgactttctgatttgcaaatacatctaagcatttggtgactcctaagttgcacatgtgtaggaagagacaccaagaaatttaaaaagcagctactacaaggctaaaaagctaagcagagatgtctgcagtttcatggtcctaaggagacataaattggagttgagcatccatcaagaagaaagcactcttgtgaacaaacaaggttttaaatggtgactcctcaaaggactatgttataaaaataagagcaagctagtcttacgtggatgaagatgatgtgcccaaagtctatctcactgccagaaaaaagcaaactcttccatgcaggatgataccatcatccagagtcttataattgttcgtaggcaagatctggcattcagttaaaaaaaaacggtaatgccaaaaaactggatcaaatgactgaaaatcaagagacaaaggagaccatgaaaatatacttgtaggtgacaaacatcttgagtttttagccagatttttaaaaagtaactgtggctagtatgtttaagaaattacgtgaaacgaaaaatttcgccagatgggctgggtgtggtggttcatgcctgtaatcccagtactttgagaggctaaggtgggaggattgtttgaggttaggagtttttgtttgtttgtttgtttgttttgagacgcagtctcgcgctgtcacccaggctggagtgcagtggtgcagtctcggctcactgcaacctccacctcccaggttcatcccattctcctgcctcagcctcccaagtagctgggactacaggcgcccaccatgacgcctggctaatttttttttgtatttttagtagagatggggtttcaccatgttagccaggatggtctcgatctcctgaccttgtgatccacccgcctcggcctcccaaagtgctgggattacaggtgtgagccaccgcgcccggccaaggttaggagttttagaacaacctgggcaacatagtgagatcccatctctataattttttttttcgagatggagtttcactcttgttgcccaggctggagtgcaaaggtgtgatcttggctcactacaacctctgcctcctgggttcaagagattctcctgcctcagcctcccgagtatctaggattacatgcatgtgcgaccacacctggctaattttgtatttttagtagagatggggtttctccatgttggtcaggctggtctcaatctcctgacctcagatgatccacccccctcagcctcccaaagtgctgggattacaggtgtgagccaccacacccagccaaaaattatttttaaaaaagataatttgaatgcataaaaaataattaattataaagcccagatggaaaaacataataactgaaatgaagaattcaaaagattagtttaacagtattcgactcggcagaagagattaatgaactggaagacaggtcaagggaaaatatccagattgaagcacagaggaaaaagtatggcatatagagaaaagagtgtaagaaacatatgggatatgaagaaagatcttatatgattgtcaataaggtcccaaaggagtagaaataaggaatgtggcaggagtcatatttgaaaagacagtagccaagaatttccccaaactaacaaggcattaacacacaaattcaagaagctctatgaattcaaagcaagatgaatataaagaaaaccacacctagtcaaaccgcaaaacctaaacacaaatataaaaaatgttaaaattagtgagattttaagaaggcataatttatcttcaaatagcaacgaaagttagcaaagactgacagctaacttgtccaacagaaacgatggacaccaggagatgatgcaatggcatcttcaaagagtaggaaaaaaattactgcaaactgagaattctatacccagcaaaataatggtgaaatggagaagaggtggggggagttctatacctttaaaaataaagatgaaatagagacattttcataaaaataaaaacctagagttttcattgtcagcacacatgtactaaaagaaatcataaagggaattcttcagatagaagtaaaagaaatcccagctagaagcccagaaatgcaagaaggaataaaaagcaccaggaaacggatgtctaaagtaatattgattgtttaaaacaacaataataatgatgtcttgtgtttaaaatgctcttcctatactcttttatacagctgaattaaacactcatcatcactcaaacacagcatgtacattcttctctctgtatttttagcctctctcttgcccatcatttgaggccaagttatatcataataccttcaggaagtattcactgaccactccttcgtttatatcttctctcccacctctctaactcagcaccatgttgtctgggtcacttatttagaacttttaagtttctgttctctttttgtttttatttcatgttgtgtgtcttggtttctcaaatagattgtatatttaatgtcctttctatgtctgctataggctgtctctatagtatatgctcaataaatgtttatgggataattaaatttgttgaagaataaattggtaatgagtgactgaccttgttgttttctaagacagaatcttccatcaatttgttaattgttattctgagatttgataaaggaaactaatataaatataaacaagaaaagctttaataaggtcttggatgaaaaatccatgaaggacagattggatgttcatatttcatctttaaccttttgaaattgatttgatgcctctttaataaaatctttcttggtatccttgtcaaatgtataaggctggtgagagtatatcacaggtatgtcatttatttcattctaatatgagtcattgtactattctggatgttaaagaaataaaagacacagcccttgagctttccagagaaaaaaatctaattggaggctaaaacacacacccataaaccaacttgaggtaaaatccaaagaaacattttagtaacgtcaagaaatatggtgtagtgtagactaaagctgcaatagataaggaaaagaaaaagaaaaaatgattacacttgggatgtgtttattataaggaaggcatctgaaaaaaggtaaattttggctttaaagattagatggaaatatacagaaaagaaggggcatagatttttctaagcagtgagaattacatgcaatacacggaggcaaaatagtaagttattatacattcaggcatctataaatagacaggcttgaggaatcaagggaaagtatgaagctagagagaggtggaggagcagttgatagaagacatcaaatatgtttatttttgaactagtgtggaattctctttctcttttcagtagaaataaccttcactgtcaacagcccagtcagaccccttagctgatataatgacgatcgcaacttcctaggctattatttgcaataatttctgccatatgagtgtaatgggaaaaatacattgcaaagtgaatgacttttgaaatgtattgcatgctgacatttgggaaattagatcctgaacacaatgcatcctgattattgaggtgccttgccaccatgaaaagataaatacagtccaaccattcaaaaaatctgcatgttaaattaatttaaagttctgtccttcggcaaggttcttctcaaaacttttggtcactattcaggcaaataaccatgagcagacactatccctggcctagatagcctacgtgggtctgaggagtccagaagtgccctcgttcaaacatagctccatcttatgaggaatcctgctgtgctcattctcctatgtacttgactgctccagtgctagaggtgcctgtgctcagctggcatcctttccatttcctgggagaagcacagccacgctctcttatgaagaacaaacaactcttcacatctccattcccacacagcaaattcctccagcaccaccaacccatctcatcatgaatgtgcatttgctttcctctgtaaagtttctgtattgacgggctgctgggctgagcaacagtaatttcagcagtcctggctccacaagcacaggtcaggaatgggtttgaagaaagctcttctgaagatatcacaaattttgctgttttaagccaaggcctgccttgtttactgaacatgtccaatttgtgtgctgaatagagcaatataacgagaggaagggaagatggacagggaaataatgggacctcacgtgcagattacaaacagaacctagaaattaactgagaatgctaaagaggaagaggaatatgaaagcaatagtgaagggtcaataatttccacataaatcagaccagatgattattttgatcattaaattgatttaaccacagctttatatacaatcagagtacatggctctatatataacaacagctcttggttgtagtcagagaggactgggtttgagtcctggcttattgcttacctgattaatggttttggttatgctactcaacctctcttagcctctgtttctttattgcggtagatactattaacctaaaatgagaaggctaatagtatctaccacaataaaattgttgtgaggataaaaaaaaatattaattaggatgcagtatgaaaaaaataaaagttagctatctttatttttgaaatttatgtaagtctaatttctccaaagtaaattggcttatattcaccaggaggaatgtctaattaaaagaatcttattctgagtcttttgtggcagcagattatcactatctgatctttcttttacttctgtattttcattgagttggcttacataaagctgcacttataaatttaaatatgcctccaataccactcggcaagtcttcttatagagagctagatacatatttaataaacagttaatatagtttgcaacttccccaaagtaaattaggtgaaaaatcccaaatgcttgaatttggggaaaaatttacacatataaatatgaatttatttatttatttatttatttttaattttttttttttgagatggagtcttgctctgttgcccaggctggagtacagtggcgcaatctcggctcactgcaacctccacctccccggttcaagcaattctcctgcttcagcctcccaagtagctgggactacaagcacatgccaccatgcccagatgatttttgtatttttagtagagacggggtttcaccatgttgaccaggctggtcttgaactcctaacctcatgatccacctgtcttggcctcccaaagtgctgggattacaggtgtgagccactgtgcccggccgaatatatttattattgttagcccttgttacaatgctgccattttataaatcaggaaactgcggcagagagaggttaaatagcttgatcaaagttacattgattgctgggcacatcctctccatccttttccaggtgccttatacctaagtattatccaaaactacctcttcatttcagcctgcaaacctcttcctatattccttttctcagttaatggcaccaccatccacccagcgatccaagctagaaatctgcgagccatcctagacttctccagcttcctcattcctcatcacactaagtcctacagttttatctatcaaatatttattgaatctgacctcctcttctccattcttatcaccactgcttttcattcaagcttctatcatttctcacccaaactactacaactgtctcctcactcatctctctgatactagccctgctgccttcacatcagtcttctaaacagcttccaggatgatatgtctaaaacacaaactaatcatgtcaatccccagtttaaaaaccttccatggttcccaatagagactgttttttgtttgtttgtttctttgtttttgtttgttttgttttgtttttgagacagagtcttgctctgtcgcccaggctggagtgtagtggcgtgatctcggctcactgcaacctccgcctcctgggttcaagcaattctcccgcctcagcctcccgagtagctgagattataggcgtgtgccaccacacgcagctaatttttgtatttttagtagagacggggtttcaccatattagccagactggtctcgaactcatgacctcaaatgatccaaacgcctcggcctcccaaagtgctgggattataggcatgagccaccacgcctggccgactgcttttaaaataaagcccagtcttcctagtatggcccttgtgatcccaaagaacacctctctcttagtcctaacaaagtttaattaaaatgaagtctttgtgtgattccccccacttttagactttgggctcttgaaaggcagagacaaagtcttttcatctttgtaatctcagtatctaccaatgccatttaaaaattattgaacccaaatgaaatgatgacattatatttgaacttagtagatcagcttacacttttaaaaacagttttcagtcaggtgcggtggctcatgtttgtaatcccaggactttgggaggctgaggcaggaggattgcttgaagctaagagttcaggacaagcctgggcaacatagcaagactgactctaaaacaaaaattagccaggcatgatggtgcatgcctgtagtcccagctacttggaggctgaggtgggaggattgcttaagcccaggagtttgaggctgcaatgaactatgattgcaccctactgcactccagcctggtgacagagtgaaatcctgtctctaaaataaatatatgcaaatggtttttgttttctgttttgtttttttgagacagagtctggctctgtcgcccaggctggagagcagaggtgcaacctcggctcactgcaacctctgcctcctcctgcctcagcctcccaagtagctgggactacaggcatgcaccaccatgtccaactattttgtatattttagtagagatggattttcaccatgttggccaggctggtctcgaactcgtgacctcaagtgatctgcccatctcagcctcccaaaatgctggaattacaggcgtgagccactgtgcccggctgcaactggtgtttaatacttttaaaaattgagatataattaacataccataaaatccacctttttagtatattcagtggcttttggtatattcagttatacaaccatcaccactatctaattccaaaatgttttgtcacccaaaaaagaaatcccttacccattaaccatcactctgcagtctcccctatttccttgccaggattttctggatgggtcaagtctaatcacatgagtccttaaaagtcccagctgtgacatcagaagaagagttagagagatggcggtgtgaaaggattggatgcctggttgttagttttgaaatatgggagactgtatccaaggaccagagagaggcctctgggagctaagagagaagccctcaaaactttcacctccaccaagctgaaagctctcaagaaaactgaggcctcaatcctacaactgcatggaactgaatcgtgccaacatctgaatgggcaaggaagcctccagcaaggatcacagtcctactgacaccttgatttttagcccagtgagactcatactagattctgacctacagaattataagacaatacatttgtgtagttttaagccactaagttagtgttaattttttatagtagcagtagaaaactaatacaacacagacttctataattttcttttttacaaaatactgtatcttgaaaattgttttatataacatgtcttcttcttctccttctccttcttcttccagagtcttgctctgttgcccaggctagagtgcactggtgcaatctcggctcactataatctctgcctcccaggttcaagctattctcgtgcctcagcctaccatgtagctgagattacaggtgtgcgccacaatgccgggctatattttttttgttttttgtatttttagtagagacggagtttcaccaggttggccaggctggtctcgaactcctgacctcaagtgatctgcccaccttggcctgccaaagtactgggattacaggcgtgagccactgcaccgagcccccttattctttttgatggctgcatcatactttatttagatggcaatttaaaatactatgttttatagtaacaattactacataattcatctttggcttagtggagggtagcttgatggcatattcccagattacccctggttcactttcttctgctggtatggaatatttgcatctgtggttactccatggtctgaagtggtggaatcctctttgggatctcccctctttgtggcttgctatggtctgaatatttgtgttcccccaaaattcctatgttgaaatcctaacccccaaggtgagagtatcaggaggtggggactttggaaggtgattaggtcatgagggcagagcccttgtgaatggaattcttgcccttacaaaagactctagagaggacccttacttcttctaccatgtgaagacagagcaagaagtttccatccttgaaccagacaacaagccctcaccagacgtaaaatctgctggcaccttgattttggacttcccagcctctagattaatgagaaatacatttctgctatttataatttacccagtttatagtattttgttatagcagcctgaatgaactaagatagcacttgttgacaataatgataaacatcatattggtgcagtgacaccaacaccagaccacataaaccctaggttttattggtagaaattgcagtaaatgaacagatgcatgaaatgatatttatgaagattagcagatgaggaatttattgcagtctttgttccctagcaaacagtattaccagtttctgcattacagtaagtggtggcaaaaactttagttacataggattagtagccaaagaaacacctgccacagattagagaaaggcaggtcaggggcaggcaaagtttcaaaagaaatgcactaagccttccctcctagaaataacagaaagcgggtaatgagtagggaaaagcagatctggtaggacacggcagctgagggctcatcctggctgagcaacatttttcatcaagatgatcagactcaaaaacaaaacaaaaacaactattgagctaacaagttcagcaaggttggaagatacaaaattagtgtacaaaagcaattgtatttctatgcactactgatgaaaaatctgaaaacaaaattaagaaaacagtcacctagaataaaaaatagaaaacatacaaatggtcaataagcacatgaaaatacattctcttatttaccagagattgaaagaaaatatgttcaacatcatttgggaaatgcaaatcaaaaccacaaagaaatactactttatacccgataggagagctataatcaaaaggacagagaatatcaagtgttggcgaggatgtggagaaattggaagtgtcatacattgctgatgggaatgcaaacttgtgcagctgctttggaaaacaacttggcagtgcctcaaaaagttaaatacagttaccatatgtcccagcaattctaagtatatacccaagagaattgaaaatgtatgtccacacaaaaacttggatgcaaatgttcatagtagcattatttgaaatagcccaaaagtggaaacaactcaaatgtcggtcaactgataaatgaataaataaaatgtgatatagatatacaatggaatattatatagccacaaaaaggaatggagtactgacacatgttacaatgcagaggaaactcaagaacactatactcagtgaaagaagccacacacaaagaaccacatattgaatcattttattgatattaaatgtccagcataggcaaagctatagagctagaatgtacattagtagttgcctaggggtaggaggcggaaatgggaagtgaccattaatgggtaaaacatgtctttttggggtgatgaaaatgctctaaaatctattgtgacagcagttacacagctctgtgaatatactaaaaatcactgaattatatactttaaatgattgttcttatggtatgtgaatcacaattcaataaaatattgtatgaaaagacaagaccaaacaagacaaattaaatgcaaaactggtcagttatacctaaaaaaccagggagtaggtggtcggggtgggggaaataaaactatgccagcctttcttttctgtcttgagtagggctaaaatggggctccgatcaggttggcaggaattatcccttcaaataagagatagtaggagtcaaggaggcagagaaagaattttacattttcaggttcactccaaaactctggcttgggtaagcttttccagtttgagctgctaagctgctcttggaaagagctgtctagttctgcctattctgatcaaggtcttgaaagcataagtgaaaagtgctggcacaagtttatcccagtccagggcctgacttcaatgccaaatttagcctttggcaacttctttccattgagagtccctgaggacttgtttgacctccttttggaaagctgcaagggaattcactcctggactgttgcccagcaagtagggagtggctcagcaggctgcctaatcctctgttaagtgaaagataaggtgcacccgggcacagtccattggaaggccaattccctatatgtgggatctggactaggaattttccaggtatataaagataactcccaacattaaatatcgtaatcaacttgagaggaaatcttttgaaaatgtagtgtacatattcctgcctttttgtacttaggctgtttttcaactggtaattaaaagattacgtggccactatggaaaaatcggaaagagtagtaccattctccttctctagagttaaccattgctaacagtttaaggtgtgttctttttttgttttttgttttgaacctttaatgagaaaaatatatatatactattgagctcaagaacactgtttggtgtgtcattgggtcaagggttagggatacaagtggcagaattcggaaatggtatacatcaacaaaaatacacacggtcataacaagaaaaactggtgcctggcacaatcaactctcagtttcctcttcactcagcagcatgttggggatcctgtggctgattgagaacatacatccagactctgggcactgcaaggtgccccccatcacttccacctccagcagcaggaggtgcatggtcctcagaaactcttcgttctcctcatatccctcaaccggccctttagcacctgggtcaggtgcaagttatcagccacctccaggaacaccgcccactccaccttgggtatcataggtgccacgaagtgggggttgaactccacagggcagatgcagacctcggtggcctggaggcacagggggaagccacgggtcccacccccaacacatgcaagctcagtagattcttaatgtatgttctttcagaccattttctatgtgtctgtaagcacagatacacatgtatgtgcacacacatgctaccccatagcagttttttaaacttaaaaaaaacataaatgatatcatactctattggtccacttgtttttgcatttaactatatcttcaagatctttccatgtcagaacatataaatctaccttattctgtttatttatttatttatttatttatttagagacaggatcttgctctgttgcccaggttagagctggaatgctgtggcgcaatcacagctcactgcagcctcaacctcctgggctcaagtgatcctcccacctcagcctcctgagtagttaggactacaggtgtgcacaccagatccagctaatttttaaaaatttcttatagagatgggctctcattgtgttgtccagggtggtctcaaactcctgggatcaagcaatcctcctgcctcagcctcccaaagtgttaaaattacaggtatgatccactgtgcctcatctactttattctttttttttttttttttgagacagagtctcgctctatcacccaggctgaagtgcagtggcatgatgatcttggctcactgcaacctccacctcctgggttcaagcgattctcctgcctcagcctcccgagtagctgcgattataggcatgtgccaccaagcccggctaatttttgtatttgtagtagagacggggtttcaccatactggccaggctgcttttgaactcctgacctcgtgatccacccgcctcggcctcccaaagtgctgggattacagacgtgagccaccgcgcccagccattctttttaaggcctacataacattccatggtataaacattctacaatttatcaaaccatttcctattgaagcatattcctatatatctaacttttcttgatgatcaagaatgttgaaataaggactcttatacatatataatatattcgtgtatatgttagagtattttgggggataggttccaagaagtaaaattatttaaatttttgatacatctggagtttatttttcaaactttatattttgaaataatttcaaacttacagaaaagttgcaagaatggcacaatgaactcccataaagtcttcacttgatcccccaattgttatttcatcacatttgcttcatctcttctctctcctccaccctacctgtacactatatacgtattagatatttttttggatgcatttgagagcaattgaggacatgaagcccttaactcatatttcctaaatacaagggcattatcttacctaaactcagcacaagcatcaaaaccaggaagtagacatacaaaacacactgatttctccaacccagcatcataaggttcattttaggcttcacccttctccaacacagagaaacccattcgcaccatcctcaatatatttcctaattttctcaatacccttgtaaataacaaatgtccctgccatgctgtctgcctcctgtgtgcctccagctatgcattcccagccacattggcctcaccctgctcgctgcttcagaacttggtccataccagtcaccgggaagaaggagtttatttttgaatggtgtgacgtaaaagatacatatatatacatatatatatatatatttttttttttttttttttttttttttgagacagggtcttgttctgtcacccaggctggagtgatctcagctcactgcaacctctgcctcctggactcaagtgatcctcctacctcagcctcctgggtagctgggactaaaggtgtgtgcccccatgaccggctaatttttgtatcttttttgtagagatggagttttgtcatgttgccagatatatcttattttcttaaatgcataatcagttgtcccgacacccattctcaatcgtttgaaatgtttccacacgtgcttgtgccagtagctgatgatctattctctttcatttatctatttttctgtttgtgagccaataccatactcgaattactgttgttgtataatatggtttgtttatttacttatttatttttagccagtggcagtcgcctatataaaatgttttgatacctggtagaatgaggttcctcattgtacttaaaaaaacgtccctgccgggcgcagtggctcatgcctgtaatcccagcattttgggaggcggaggccagtggattgcttgagctcaggagtttgagaccagcctgaccaacatggtgaaccccacttctactaaaaatacaaaaattagctgggcatgttggcatgcacctgtaatcccagctactcgggaggctgaggcaggagaatcacttgaactccggaggcggaggttgcagtgagccaagatggcaccactgtactccagcctgggtgacagagcaagactttgtctcaaaaaaaaaaaaagtcccacctcttcttaagtatgtattcttccagatgaattttaaaattaacatgtcaatttcattaaaaatcctattgtaattttgattggaattacactgagtttatcaaatatttgggtaaaaatggcatctttccaatattgagtcttcctatcagggatcatggtacaccttttcatatactcaggtttttaaaatgtcttccagtgaatatttggctttgtgttggcatcacacatacattttgttcctaggtttcagacatttttttggtgtctattattaacgggatctttttgtcccatcttctttccatatctttccatatatttctatatatttctttctatatattttgtacatagttgagattatgctgcacacatcttgtcttttaaatttattccataaaaactttctgactaatatagttcttatggttgcataatcgtccatcaaatatttacataagataatttactgaactacttttaaacattggttaactagattgtttccaattttaaagatgctaaatactactgttataaacatctttttatataaatctttgttctgttttgaattatttcttaaaatttataagtggtatctctttttttctttttccttttttttttttttttttttttttgagatggagtctctttctgtcacctaggctggagtgcagtggtgcaatctcggctcattgcaacctccacctcccaggttcaagcgattctcctgcctcagcctcctgagtagctgggactataagcatgtactaccatacccagctaatttttataattttagtagagatcgggatctcatcatgttggctaggctggtctcaaagtcctgacctcaagtgatccacacatctcggcttcacaaagtgctggtattacaggcgtgagccaccgcgcccggactctaagtgatacctctttttttgttttgagacagagtcttcctctgtcgcccaggctggagtgcaatggcacgatcttggctcactgaaacctctgcctccccggttcaagtgattctactgcctcagcctcctgagtagctgggattacaggtacgcgccaccacgcctggctaattttggtatttttagtagagacagggtttcaccatgttggtcaggctggtctccaactcctgacctcgtgatccgcctgcctcggcctcccaaagtgtgttttgttttttttgagatggagtttcgctcatgttgcccaggctggagtgcaatggcgcgattttggctcaccgcaacctctgcttcctgggttcaagtgattctcctgcctcagccttccgtgtagctgggattataggcgcgcacaaccacaccagggtaattttgtatttttagtagagatggggtttctccatgttggtcaggctggtctgcaactcccgacctcaggtgatcctcctacctaggtctcccaaagggctgggattacaggcatgagccactgcgcctgtcctgtaagtgatatttcttatacacaatacagacattccctgaaagatcttggataacacaaaactatgataagttgaaaacatcttcatacataattgtttaaatttttaatgttttgctcctattcaatttacttattcacagactggtcctacatccttcctatcacttagcttctttggggacgtgattagtgtgatggctaatattgaatgtcaacttaattggattgaaggatgccaagtatttttcccaggtgtgtctgtgagggtgttgccaaaggagattaacatttgaggcagtggactgggagaggcagactcacactcaatctaggtgggcaccatctaatcagctgccagcatggctagaataaagcaggcagaagaaattggaaagagcagacttgctgagtcttctggtcttcatctttctcccgtgctggatgcttcctgcccttgaacatcagattccaagttcttcagtttttggagtcttgggcttacaccagtgatttgccaggggcttttggacctcccgccacagactgaaggctgcactgtcggcttccctcctttagaggttttgggactcagactggcttccttgctcctctgcttgcagatggcctattgtgggatttcattttgtgatcctgtgagtcaattcccctaataaactccccttcatatatacatctatcctattagtccctttagagaaccctgacgaatacaattagaaggtaataaaatgggaaatacacaaatagcagtgtcataacacaagccgatgcagtgagaatctgcgtgggaacagaagctctgcaagattgcccatggagggccattatctccttatatctgcaacttctggccttatgtacctactttgtggtgttcatttgtacacttgacttctttgcatttcttaatgtgatatgaaacctcccacatcttaaaattttattatgtgccttatggaactatttacataaagttgagtgttgcctaactcaggaagtgtctttatatgaatgtaatttaaccttcttgtttactcacagttaatacagacatcagttttaaaagtttcttccccaaggcttatggaggtatgtagggctgttttcccctacgctgaaggaactaaattactgtgctttttgatcattaagttaatatttatacttttttttcatctacaccttgcttaaagacatctagctttcagctgggtgtcatggttcatgcctgtaatcccagcactttgggaggccaaagcgggcggatcacttgaggcaagaagtttgagaccagcctggctaacatggtgaaacaccatctctactaaaaatacaaaaaaattagctgggcatggtggtggctacttgggaggttgaagcacaagaattgcttgagggccaggtgtttttggctcatgcctgtaatcccagcaatttgggaggctgaggcgggtgaatcgcgaggtcaggagttcgagaccagcctggccaacatggtgaaaccccatctctactaaaactacaaaaaattagctgggcatggaggcgggtgcctgtaatcccagctactcgggagactgaggctggagactcacttgaacctgagaggtggaggttgcagtgagtcaagatcacgccactgcactgcagcctgggcgacagagggagactccatctcaaaaaaagaaaaaagaatttcttgaaccagggaagtggaggttgcagtgagccgacatagcgccactgcactccagcctgggcaacagagaaagactccacctcaaaaaaaaaagacatccagctttccagctttctcttctcactgctgtctgcatgactgcagtgatagtttttcctccttccagtttattgcttttacttttctatgggtttgaaaatcagattcccagcttttctaaaatcaaatccaagtaaaaattaataggccctgagaaggggctttgatgaatgtctaggagtaatgggcatgatcttcagggcatgaacatagtggtctccgtttttccagaggcctttttccatctcctttattcccttggttctttgctgtgctcctgatagatcagattttcagatagccaagttccaagtcggtaatgaaatgaagtttcattacaattactaggttggtaacaatatgttaaaatacccgtttcccttttcctctattgaattctgatttttttttttttttttttagacagagtctcactctgtcgttgccaggctggagtgcagtggtgcgctgtcagctcactgcaacctccacctcccaggttcaagtgattctcctgcctcagcctcctgagtagccaggactacaagtgcatgccaccacgcccagctaatttttgtatttttagtagagacggggtttcaccatgttggcaaggttggtctcgaactcctgacctcgtgatccacctgccttggcctcccaaagtgctagggttatgggcatgagccaccacgcccagcctgaattctgattctttactcccctttgttccttttagggtgcgtgtcgggctggattgactcaatgtagtcaatgtgaagctcactgggcttcagctgagtgggataaggcccaatctacaccttcatttcctcttatcttttcttccccccacctcttctctatatatattttttaatttttattttccttttttttttgagacagagtcgctctctgttgcccaggctggagcgcagtgttacaatctcggttcactgcaacctccgtctcccgggttcaagcaattctcgtgcctcagcctccccagtagctgggattacaggcacacgcccccactattattttaaataattaaaacctctctacatttcacatcaaccaactataattctcttatttaaaaaaaattgacatctgtctaaagcctcatttgattaaaaagaaacttaagtgtattccattatatgaaataaaacaatttacacaaccctttgtattcttacctttacttttactcatgcctaattgatatgggctgtggtactaagccataattgtgggctcattctctgcaatggacaatctttttcttttgccgctgactgccccccaccccactccactctgtagctaaatcaaatgcagaatgagaggagagagagagacagaacgacagagtctgatagaaaaaaaaaaatagaggtcagaagtgagagacagaacatgttctaatggcagctgagtctacagatccaccatactcttatccttggcttccgggagatatcccagtcttttattgaatttggaattccctataggtggaatatagtaatatttattaactaccttataactacttatgtgctctgagtgagggcatatatcaggttcatgaaaacccacacagctattggagaattaactcaaagttcaggtcttatatgtggtggctcagtggcataatctttgtatgtgggcatttttttttacatgttgctcttgaaaaataaatgtgttaactataagcccaaagaggtgatcatcaatgtttcaactttagatcaactaaaactttcttgtattatacaatgtcatccctcagtcactttttatacattgaattgtgacatttatgcatctgccgatctgctgatgactggatattttaagctcttcttacacagtggcacagcctaccagtcaagagtctattttcttttctttttctttattttcttcttcttttttttttttttctcactctgttgcccaggctggagtgcagtgacatgatcatggctcactgcagcctcgacctcctggcttaagtgatcctcctgcatcagcctcctgagtagctgggactacgggcctgtgttaccacgcctggctattatttattttttgtagagatagggtctcactatgttgcctgggctggtctctacctcttaggctcaagtgatactctcacctctgctttctaaagtgctaggattacaggcatgagccatcgtgcccagcagggcctatttttggtagcatcactatttttggtatatgtttacgtaatcatttgaatactttattacattttctccactattacaaatatgagtcaaaaatggaaaaataaaaatgctgatgctagtaataagcagcataagtttttgaaacaatacaattgagcaaaggaggagtcattggatatatacaaagccgtgaaactttagcttaccctgtcaggtagatattaattaggacaaaattagaacatataatacatgctggaaatacattatcaaagattgtatcttaaaggtgaattaggcagggcgtggtggctcacacctgtaatcccagcacttcaggaggctgaggcaggttgatcacctgagatcaggggattgagaccagcctgactcacatggtgaaaccccatctctactaaaaaaaatacaacattagctgggcatggtggtgcacactgtaatcccagctactcaggaggctgaggcaggagaatcacttgaacctgggaggcagaggttgcagtgagccgagattgtgccactgtaatcccgcctggacaacaagagttaaactctgtctcaaaaaaaaaaaaaaaaaaaaaaaaaaggtgaattgcaagtaggaattgaatactatttttcagctccctagaaaaaatctctgctcctataatattcaatgcatttaatttttgcgtaatcaatgtttgtacatgttaccaggaatatattaagtaagaaaccgggtaagaatgggtaaaaaactaactaggggtccacgtgtacggaattccagactcattaaaggactggaatatccctcggaacctataatgtatttgagaaacaagatgctcaaaacatttaaatatataatatgtaatacagtatactatagaattaagtgtcaacatgagtaaaacagtaagttctgtaataaatcacagaaggagggatacaagtttgactgggatggtatggaacttcttcttgagttcttcgctttcttgaggaaagcaaagcagtaaaaagaaatggatggagtagagaaggaagggaccaatctcttaggtcaaagaatggacctcttttgaagatgagttgttttcttaataaagacaaacattgatgtgaactacaaatagacacatttcacgtttaaagaacagatcgttgagcaacaagtgtggctgaataggagagcatttattaacaaggagaaaagacatcagttggtaaaaggttaaaaagatgggcctggaccagactgcacagggtgtttcttactgcccaggaaaggaaacatcgtggagtctttcagcaggagaatgacagaaaggcagagtttaaaacactcatctaataaggtggatttgagcagggagggacaactggtaagaatctggttaagaagatgttactatttagtgagctaaagaagatgacagctgatagtcaaggattgtgcctgtggaaacagaaaagaatagttctaaaaccactgcatgggaaaaattaacataatctactgaataactaaatgcagggagcaaagaacagagaagtatcaaaacacaacaaggtaacaagtctagcagtctagaagactggagtatcagtgacagagcaggggagtcagaagggctgctttgggagagaagaatgagagatggttttggcatattttgtatttgtagtagctctttgctacttttgagttacaaatcccttcctttgagaatctaatggaaccaatggattccctcttcagaaaaaataaatgcattcatacttaaacacatgttgcacaatttataatgtacacccctggaattggctgcaagagagctcttgatccaagctgggccaatcagagcccttcctggaatttttgtactctatatccagagaatcaagtcagtctctccttactagctaaatctgtgaatgctgttagctgatgtattttacaacacatgagcctgagaaacagagaaaatgctcaaatgtagaatgagaagagagagagagcctaatacaaaaggtcagaaatgagagagagaacgtgtcctaatggcagctgagttcatgtctttattaagaaagcaactcatctttaaaagagatccattctttgacttaagaggttgtcgtattcattccctcctctggactttcgttgagctctcagggcccttccttccttctttccaaccatttcttttttctattctgcttttctcaagaagcagttctataccatcccagtcaaacttgtatccctccttcttgtaattaattacagaacttgctgttttattcatgttcagacttaattctataatatgctatattatatatttaaatgttttaagcattctgtttctcaaatagattatgacagttaagtaggcaagactttcctcaaatcaattctatatgccctatggcacttatcacagctatatacgaacagtaggtgcaaatacttgtcaaacatttataaatgtcaatgtaaaaatatatgagcatttgtttattcacattttacatgcatttttcattttacaaaaaagggatttactagaaacttcttttaagtagtagctcctctatgtggaaatgtttttaagtgttcatctagaaatattaaatattcatcaaaaggctgaggtagagttggtggggaaaatgttgaagctattgggtaagtcattaattacagatcaacaagaaatgagattatgaaaaacaatcaatgacaaaaatctcatttacatcaacctttcagaaatgcttccattgtgtgacatggctcactttttttttttttagtggggggtcttactctgttgccccagctggagtgcagtggtgcaattatagctcactgtggcctcgaactcctggcctcaagtgatcctcctgtctcagtcttctgagactctgggattacaggcatgagcaactggcaacccacatttaaaaaatatgtaatctttgttctcctttacactttatatggcaatctcctcagggtaactgatagagaataaagtttatgtctaggttcagtttttggctctacgcatcattcagtgtaaaattgggctggttatttaacctctcagaacccccctcatccaaaaaattaagataatacttatctgataggatgttgtgggaattaaatgaggttgtgcatataaagtagctggtgaaatatttgctgccagtaggtgatcactcagtggtgggtggtatgactttttatttagggagagagagttgagggaaaagggtagaaaaaggtgaacctgatggtttacttaagagacatagagggctgggcacagtggctcatgcctgtaatcccagcactttgggaggctgaggcaggcggattgcttgagcccaggagttcgagaccagcctgggcaacatagcgagactccatctctataacaatataaaaaattagctgggcatggtgacatgcacctttggtctcagctactcagggggctgatgtggaaaggtcacctgagtctgagaaatagaggctgcagtgagccatgatggtgccactgcactccagcctgagtgatgagggtgagaccctgtgtcaaaaaagaaggaaagaaagaaaggaaggaagagaaggaaagaaagaaagaaagaaagaaagaaagaaagaaagaaagaaagaaagaaagaaagagagacttagaggtagccagggaagacaccatatgcagaggtgggtgatagtgcagagttgaaagggcaagaaagggcattttgaatgatacagatgatgctaaaatgttgggaggtatagggcaaggatgggctacattatgaacaattatttgcaggttcttattacacggcatacgttacatttccaaatttaagttatagactaacatctttactagaatggatttttagtaggtaataaaattagtattctcaggatttcaggtaatagtgacagaaaagggaatcagggagaggagttgagaacagaggtggcttcttgctgcaatgttgctctctgtccctactataccccactcacaactctgtcagggacatattgtttcctcctcaaagttagagtgtggcaacaaattataagactggacagtagaacgacctggaagagaattggcagaatagaaggatggtggatgatcaaaagagcgaagcagtgagttcattcctggacactgcccacatgaaaatgggatttgggaaaggttggctaaaagaagtggtgactgatctttggaagtatggtgaggacagtgagtcagagttactcactttatcagcgcaggggaccatgtgggttacagctatcagatcttactgtgggtaaatccaataaagagctctgttgctaaaattgaacaattacagtgtttttctaatttccaggaaaaatgggtttaaaggttttcattttgtgaattattattaattttttggtacttcctaccttgtaaaaaagttgcaaataaatttaaagagaaaaacacagacatattatttcttaaaaacacattattttttggctggacacagtggttcacgcctgtaatcctggcacttttggaggccaagttgggtggatcacatgaggtcaagagttcgagaccagcctggtcaacatggcaaaaccccatctgtacctaaaatacaaaaattagccaggggtggtggtgtgtgcttgtaatcccagctacttgggaaggaggctgaggcacaaaaatcgcttgaactcgggaggcggaggttgcagtgagccgagatggcaccactgcactccagcctgggtgacaggtcgagactctatctcaaaaaaaaagaacaacaacaacaacaaaaagcccccatttttttattatgtgattatgtggagatttgcataaccataaaattgccagatttagtgcttgtaaaattgtgtcaattccatatggcagagttaaatctatctgtatttcatgatgctccacgttgagcaccataatttctagagactgccacctgaactagtttgaaaaccaacattacacccctgactgccttttgttatttctcagagaaggaatgttattagcctcagtggaactcgcagggaaaggcttagatagaaagtaatcttaaaaaaaaaaaaaaaaaagaccgaaggagaattaaatagggtaaattcaagtgtaagaaggataacataatagctcctgtttcctgagtccttattgtgtaacaggatttgtgctaagtattttccaaaattttgtttcatctttacatccatctgtgaggtaagtattaatatcacccacgttagacagatgaagaaaggaaggtccggagacctgttcaaggtcacacagcaggtaagtgttgggtgacactgagattcaaactgaggttttccgactgcagtgatgatgacattgtaatgcttctttgtgtgtatgtgattttaaaaaactgacatgaagtgcacagatctttttgcatatgtatacacccgggtaaccattaagatattgaatatttccagcaaaccagaaggctctctcctgtcccctctcaatcaattcccctgtaagtaatcactaccttgcctctaataccataggtagatgggttttcattagattaatctaactttctggagttaacaccaaaagattccatatgtcagcccttcaccttgccatgttagctgtattattcaaagctgctctagctctgactttgcaagcattcactgtaaagaagagctgttggatggacatgttcatatccagtttcttgtattgttctgaaattaatactaatttttgaaaatcgaagaaactcctggatgaagtgctacaggatggggcagattaaagtgctgttatcaaacaaacctctctaccttggaagcgccacagacagagcttccttgattgatgtaatttggcgcatctatttccaatcatgtcatctgattaagaagttggatgaccacgaaaggtcatctcagtttatggaagggaaggcgagccgggcagagttggtaacggtgattgcttcgcatcatcttgcagcacgcgatgatgtttatgtcccaaatacctcccacagccgacttgctgttttatgataggagggaaacagtagaggggaagaagatctaggtggagggtgaaatatgacctaacatcgttcgacgaggtattaatgtggtggctttcccgcccttgtcgaccagctcttaaaaccacgctacttcttagtcaacctggcagtgacagaagcagcgccacgactttacctcaggtttgcaagctgtggttggtgaattttcagccattattctaaataacagtctcggtctccccacaaaccccactgttgttttgtttttctttctcattctgattctccccacagccaaccgtggccttttgaagtcgtctacaaactaccactgagaatccgggaaagaataactgacacttgtaggcttcgaggactctcagagtgatatgtgcctgaggtgaccgaagtgggggagatctaggagagcattccggtcatcaaagcaggaggacaggccctgaaatgggcgcacgtgacagcagcagccacctcgagagtgacatcacccctgagggcggagcccaactatgtagggccttgtcagttaccgagcgtcctccctgctgcccctccaaatgccacccacaagtccgagccccccggggatacgagaaatgccaggacatcccagagcgccagagccagggccccgtctctccgcgcggaggagggctgcgtccccactccctcttccagccgttccccacccccaaactgtggaaggggcgggggcgcgcgcgctccaccacgcacgcgcccccacgcacgcgcgctccctccgcgctcgcgcccctccccaccccagcccggagggggcggggctgcgggcggcctcagagggtgcgacgcccccagcgcggcggcggcgctagcgagcggccggcggggcgcgggttgctgggcgcgctgctccggcggggcccgctggcacagccgcctcgcgcgagccgcccgcccggcgggggaagctgcgagcgctccgagcgcccggcctagggccgctggcgctgccctcccgccgccaccgccctccgcgcctccttcgggcggccccgcccccattcccatccccctcgcgctcacctcccggctgtgccgcgcgctaggcggagcgaggcgcccgccgccgccgagccgagccgaggggcgagagctggcccccgagccgccgctgacaggagcaccgccgcgggctgcgctcgccggctgcgaggccccgccgcgccgttccggggtgcagactcgccgcggggcgttggaggactgcgaggtgctccgggaatcgcgggcggcgccggcgggcggcgcggtcctcacaggagaccccggggactggggcttgacccggaggtgcagagagcccctcagagcggcaggtaaggggcccggggagcagggcgaggaaaggtcgcttcagtgacagggtcgttcgcctccacagcctcggctccggggagaggggcgggggcgagcggggagacggcgaaatgggcagcgaagtgcctcggtgtccaaggcgtggggaaggctggctccgaatatgacaccaaggcgggcttcagaggcgtgtggggtcgccacttggctgtcaccgaagatgtcatggaatttggtacctagagcgtctctggatgacggggaccaaggataagatgcgaggcggattgctaaacgtggcagggaatgtggtgcagaacgagttgcaaaatgtgcccccagaatgcagcataaaagtagttgcgaaatgtgccaggtaaggcacaggatgggctggcctctgtggcgttgaaattcatggtcgaagtgttattagcgatattaataattcctctgggaaaggaggtgtagcataataaaagattaataaggctcattgctagatattttgccataggaaatcgggaggagctatgataagctattttttttgaggtagagaaagtaaccacgtgaaagaaaaaaagcaaattgtgtctggctgtgagattggaaagaaaaaatagggctaaaataattccaggttttgccatcagcgtgtagagcattggtacaattgtatccagtcttcatttccaggtgtggaatgtttagaatggtcttcacaaaacataaacaatgataattaacattaggaagaagatttggtgtttcgggtgtctttcactctcttctctgctcctctccaggaaaagaaacaaacaaaaccccaaacgtcttgaccataattatgagttaaagatcattaggcaaagggaagtatttttcgtatgtgcccttttcctgatttttacacaggtgaaaatatctgtaatgaggaaaacaaagcagtgtggtgaacaaaagggatagattttcaggcattttgaggggttggagccagtatctatcacaatggttaattatagagaacggcagtactaaaatattcttgtatgttcttggtgttgggatggtgaaataaaaaaaaaaaagaatacagtaaattggcataaaaagcaacaacatggatactgtcagtggagtgcttcttgcagcatttcccaggtagatcctcttagggatgtgagcacgaaataaaacgttaaacattctctttctccctctctcttgctcccctctgtatctagatatttatttatgtctctatatagatatatgtgcatgtatattatacatacataagaaattaccaacatgctgcaaaacattgtgacttccatttaagaacatctgtttcgagaggattgtcagaacatagctggaatttcagaagtaacaaaagacaactccatgatctatttaatgtaacttatatgtatacatacaatgagtgtgaatatactatataacaaaagcagaaatatggaaatgtgttcgttagaatgtacttaattattgatgagattttaatgttttatgttataattcttgtaaagaaattaaattacatgtgtgaatgctgttctcattatagtaatttgccagataatctgaaaattcatactgattggctttcccttagatccaaattcagccattgagggatcatttgcttcaaagacaaaaatagattttccttggtgattgattttgggttttagtcttttctgtagatatgtcccttaccttgagaagctgttggggctgaagaacagaggaaagggccagaggagaataaagagaattctgttgggtcttcctgttttgttctgactgtaagccatatgtactgccaccccctactgtctgtaggaagaggtgttacagagcccgattcttttcttgttatcactgcccccttgtgtaagggaagaaattgatagttgcgctcggggaaccagtcctctcagattgttcttgatagagtattatgtagatctgtgaatcacctattttcttcagagttgaagggctttaaacttactgttaatcaggcctcagatttggtgtctattttaaatataggtagcatttgatgttaggaattcagattgcttaagaatgtttttggtactttcaggaagagggtgcaatacaattactactacattcttcccttattgtatgcaggggattggttccaggacccccacatatgccaaaatccttgcatgctcaaatcccgcagttggtgtatggaaccatgtatagggaaaagtcggccctcaatatactcggtttttgcatcccatgaatactgtattgcttgaaaaaaatctgcataggagtagaccagcacagtttaagcccatgttgttcaagggccagctgtactagtagtaacagctcacatttatgtagcacctattctttgccagtcccgttgtacgttgttttaatcagttccaacaccctatgaggtatgtgttgttatttctgttttacagatgagaatctgaaacacagagaggttaaataacttgcccaatactatatagctgagaagtagaagagctaagtttccatttaggaatgctagctccagaacctgtgctcctcatcaatatgctatattgccctctcactcaaggtagtattggcaaggcataattaaaatgcatgtgcccatcataaagcaagtacaatagatgtggataaacctggacaactcacatagatgttaagtctgcatatatacaaaagatacagttatttgcagtgtgaacatttctctttaggaatttgttttttaacttatttctgggattatgcgtagaggagtattagtactttttatgtggttaaggaaatatttgtgatggtggttggtttgaagggaacttcagaggtaaaaagttaatttcaagtagtttaatatagtgtgtgtgtgtgtgtgtgtatataaatacacattcatacacacacacacagcctttttaagagcaccagtaaacctttactgcttattttctgtagggaaattaaggataaattacaatatttttcttcctactcatatttttatgacctctttttcatttatattaaaaactaccataattagcacaaatggattagatgcctatgtacattttacctctaatgtcaacaaatgtttgttcagatttttctcacacttaaacattgttttataagatattgaccacatatgacaaagtatttataaaaatgtgtaaaatataaagacttcacaatgcagccaacacttacatgccttttacccagtttaagaaatggaacatcatctttcacaattataatagttattttcttctcttagccaaattgcttctgccattctttttcaacagaaacctttccttattgtgctgcgaattgcatatctcatgtaaccaaacacttccctttttatatacatttgttgatatgggaattcaatataatctactgcttatggctaaaacttattcagcatatatgcttacgtaatttaatatatttaataaattgtcatacactcagactatgctttgtatttgtattggttactggttggtagttcattttagcatacttcacttgtaaaacttaatttggtttgcaaattaggattttactaacattgttaaacattaatagattatttccctcttccatcatgaattcttgactgtcccacgctagctctgttttttcttcttttccccataactgcctttgctctttatttcttaagtgagtatgaattattttgaatggagagggaaggagaccctagaaaggagtatactaatccagtcatttcaaaggggactattagggtagttggtactgattgaatatatggtagaacaagtgtgcataaaagaaatgcatgaaaatcctctccttgtcatatttcttccttttacagtagaattaaaatgagatctgagacactctgattgggcacactagctgaatattgttggattgaacttacccagaatcaccaatgttagctgggatatttttgctgacagtacaatatgcagattttaattcagggagctagaacaagctgttgcagagggctgtttactcttctagtactagtctaatcaaggcaccaaatattataaaatagtttggaagctagttcaattatttggactttttttttctttctgaatgacttgagactcagcattgttatatttgcttaatgtgcctgtagtcatcaaatgctgtgattattttgagggaaaggcactctgtaaatatactatacaaataaatagtttagacttcgttgtaataccgtgagaataccgcttggtttctttgaatagcgtcttttgtagtaacttgcattagatgaagaccgtttaaaatgaaaaaaaaaatgagttaaggagatgtgtgtatggtgatgcagagtgtatatccctgatgagtttcttgaaaaggccacggagagaaataggttaaagaagagcttaaagactagagctgtgttttcccactcagcagtctcctgctgcccttcgctttccctttcttttctcttttcaagacaggatctcactatgtctcccagggtagggtgcagtggtgtgatcttagcttattgcagcctacgtctcctgggctcaggcgatcctctcacctcagcctgctgagtagctgagactataggcacgtgccaccatatccagctaatttttgtactttttgtagagacagtgtttcactctgttgtccaggctcatctcaaactcctggactcaagtgatccacctgccttggcctcccaaagtgctgggattacaggtgtgagccaactgtgcccagccagttttctttcttttagagcaggggtctctaacccctggaccatcatggcctgtttggaaccagggtgcacagcaggaggtgagtggctggccagccagcattactgtgtgagcacctcctcctgtcagatcagcagcttcattagattctcataggagcttgaaccctattgtgaactgctcatgagagggatccgggttgtccgtccttatgagaatctaatgcctgatgatctgaggtggaacagtttcatccccaaaccatctctgcccccctaccctctggaaaaattgtctggaaaaacgtccctgttgccaaaaaggttggggaccgctgtttcagaggacattttactttgcgtatttaagattcaaggtaatattagatggagaacaggaactttgggtctgagttttagaaggctaaagcaggttacgcaattagtgaaaaaactttctgggacctttttttttctagaagggtcaaagtaactataataccataattttttctggaaacaaatttattaggtcagtttattttaaaaaatctttataaattatgtgaaagctgtgtttgtggatatgtcatataagttgtttttttgttgtgggccacacatgacgtatcttgttatgttcggtctcttgtttgctcttgaatagttaaaggtaagcattactaaatttaagagtcaaaataattgtgttagtgttctattatgccttttcttccccgtaatatcaatttctgtctttattcactacatggtttatagtgcatcttaaactcctttctttgtttatcagaacttaagagagtctcatgtcactcatttaaactgagtagttgcattatagaaatgatcttgttggtgtgtttttttaaaaatccaattgctgaggaaacacctttagtgtttttgtcaactttgcctacatttcttccattgcgttgcttccagagtgatctttctagatagtcatttgatcatgtcacttttttcttcagaatctttcactggctcctcatcactgaatggataaagtggaaactccttagcaaaccgtttaaggtccttaatgatctggtccctgcctcctctttagactcattgcctgccacttctgtcttcaaagtgctttagcggtagtaaactgtgtgtggttccttcagtatgtagtattctcctaccttttcatgcctttatgaagttctttttttcatggactactcctgccctctcctttgttctctgggcaaactgcttcacagccatcatgcgttagcccaatgtcttccgagtgaagaaggttttgcttactcctccaggtgggcttgggcatgatgttctctatctattctccccttgcacttggtgtatatagtagttgccgcatttttttttttttttttacacggcgtctcactctgttgcctaggctagagtgtaatggcggccatcttgactcactgcaacttctgtctcctgggttcaagtgattctcctgcctcagcctcctgagtagctgggatcacaggcatgtgccaccatgcccagctaattttgttatatttttagcagagatggggttttgccatgttggccagcctggtcttgaacttctgacctcgaatgatcggcccgtctcagcctcccagagtgctgggattacgggcatgagccaccatacccggccgtaacatattttaaatatttaatatgactggttcatcactaatgtgtgagcttttaagcaggcactgtgacttttcatcttttcagcatcagtatagttagtacatagtaggtgctcattatctacttattgagtgaggattgttgaccgttatctcagttatgcctttgaaacctcatctcttattgtggaattagaggaaactttaggcaccaggaggtaggtttagagaaatatacacaccatctaaaatattactcagagtaagtcctggactgtaactaaaactaaccctaaagataaaccagattttgttcttttttatgtttgctggtggcaagaggaagatgagaagattctctgaactttagccaaatgattttctttgtacaatgcaagagttgccaaactatagcccatagaccaaatccagcccattgtctgtttttgtatgacctgcaaactaagaatggtttttacaattttaagcagttgaaaagatatcaaaggaggaatgatacttcatgacatatgaaaattaaaggagattcaaatttcattgtccataaagaaagttccattggaacttagccatattcacttatttacatattgggtattgggtgcagcagcagagttgactactagttgctgtcgagaccatacggcctgcaaagcctaaatatttactagctagctctttagagaataagtttgtcagtccttggtctgttacatagcctgtgcccattaagtgttcgttgaatatcatgagttggagatataccagctacttttttgaagggcttcgcagggcataattccttctatttactgagaagattggccactttgcttttgtaatgatttatctcacaggcccctgttgtacctctctgatgacacccttattacatctaacactgaataagactctcacaaagtgtgtttcaagattctattcctttttttttctttaaaaggtggagaggagtttggagaacagcatgtagtagaatgtttttcttcgctcacatctcagtttctcatatacattttttgcaataaaagatcattgttatatttttaaaaaccttgattttgtatattagtttgttaggcagacaccttgtgtgtaaagtttaaaagttgaggtggattagttatgttggaaaaactggggtatttttatggagtgtattaacatattcattcatttaaatatttattgactactatgtataagttgttaattttactactattgtctttgacttggggatggaaatttcatattcttccttaaaagctaaaattgtaattcagaatcctgtgtcttacatattttttctacccctgggaaaaatatagttcaaaaacatatgtaccatactattaatatttgccacttccctgaagttcagtaagccaatgatgatagattttactgttttctttatgtggcaaagtgttatgaaaaggcagtgattgatatattccttttcgtagatatcagccaatgttacagacataaaattcataaagaaaagtacgtaagcaataatagtggaaaacttgtcattccaaatggatgatctttggaccaggtagccattcttatttccttgtctgtaataccatgctagcattatcatatgatgacgtagctgattataaagattgacaacattaagaaatatggccccagttttttactgccatggaaatcccctggttaatccagccttataagtagattatagttattgaacttggaaacgagagtgggtatatagagattgtgatttagtcattttatgcttggagaatgtgcttcaaatctcagatctcaggcaattctgtctgcctaaatgaaggtagtcacttcttagccctttattcctaatctttcattgggtggaggaatcccacaatttctagttgtggttgctgaaatttggtaaggcacagctagttaggttataggttatagaaacttgatacatatttattgtactctgtaattctatttctgttcaaattccatggaatcctctagggcaccctgggattgtgaattagtgtgaatgaatgtaaatagctttagtgggcctatggaatgaagacttattaaaccacataaataaccgtccaaccacatacacccatattctgcctcaggatcagagaatcagcttttccattttcgggcttttttttttaatttttttttttttttaatgtagagacagactttgtttgaaagctgttattcagacattcctatattataggatgacagtactgttgctcagttgtaagtttagaaattccaatgatgagaccagtatatattggaaagaatatgactttatgagttttgaatcatgaaaatgggtttgaattactgctctgtcactaattgtatgaggggccaaaaatctatctcacagggtttttatgatgatgaaatgaaaaatatcttggtgaaaatccttaggacgatgtctagtacttaataaatggtaatttttattagcctgtggaaagtatcctaaatttttcttttttgatatatgccagctcctcccaattttttactggcattgtcactccagcttttctttgttatcttgtcttgatttccttttcagccttgcaaggcattttagaaacccatggtagtttggatactgatttattttattcatatccttaaattttcttttgtgaagtatttgataaaagctgagagaaagagtttttgaataactgtaaaccgaaaaactcagatactgctgggcctactctttttatgcattttttttggactatttcttttgaacactactaacttgacaaaaattaattttaatcctttctataaaatctcaaatcatagtgtttcttgagatgcgccccttgacagcttttcttcagtttgattatgtaaacagttttaacttctacaaatatctttttttgtgaataataacttgaactttgctccttacacccctacccccagccagtgcctcaggttgacagctttttgtaatctttcttttttgaaacattgtatgtgacagtcagtcaaggtggactgcttggagggtttgtctggtttttttttttttgatatctacctacttaataaaaaagggacttatctatttacagtgtaaaataatatattggaaaattttgcccctttttctgtggtataatcagttaactatttagaatcttgtaaaaaataaagtagaggttcctcttcaaagaaactttcctccccgtctaattaggaataaatagtaacttctcttagaagcaaaatttattcaaagatccgtgctaacattcttaaatactacctgtaataaaaaaaattaatgtactttatattcttagctctcacaatttagcctaaatacttgccctggcatgcttatactggtccaagaaagcattaggtcgtagcttgttcctcttccttatttggaagtatttttacctttcttagcattccacaagttacttcctccttcctttgttctcctctgcctttgcctcttttaaaaagttccaagtcgctagccaatcgtgacaaatacagaatgtgaggtcccgttccagccgatggaaaccagacacagcagtaaggtggacgcgtcaggttataaatgaccctgtctcctttgttccatgcactcttgtggcaaaactgttggcgagtgtaccctttctgcagaaagtaaaaatggccttgctgagagaattaaatttatgttcaagtgctatttctttgcagccccagggaacaagcattctgtttctacataaacatttttgacatataacaatcccatttttccctaagcttcagttatttctgtagcactttgtcaatttctgcttatctgtgtatctttagtataattattgaatctttttctttaaatgaacttgactcattttctcttagtttcatctttagttttcctgatctttataaactgataagtttgtgctagttataaactaaagaatagttcatcctgaagacatttcacttaatgcacttgggaaagactacttatatgcaaatttggttccagattggattgttttgaattttaaaataacttcatataatgagtcttctccttgctttagataatttaattgtttttgtctttggatatgttaaatgtaggcatttattggttgtcaacaaatgttaattgtcattacttataatgggcagctggggtatttctcccctatcccctaacattctacctatttttttttaattacaaaagtaatattctccccatcccctaacattctacctatttttttaaattacaaaagtaatacatctgcttgcaaccactaaaataaacaaactctaggagtcaataaagaaaaagttgatattttcctctcccctcgggtttctcccttctctagttatattccttggagtagccaacgttaaccaacactttgataaggagtattttttcagtgtgtttctctttgctcaaaaatatataagcatatacacataaatatacaggcttcttgtttttctaattaaatagggatcatattatttattgcttagtaacatgtattactcatttaacaatatatcatggctatcacttcagttcagtaaatggaactctaatttttaaaagctgaataatattttatagtacactgtaccataatttattatgttatttcccaactgatggatgttaagattgtttcctttttttgctattataaacattagttcactcttatgactagagaagcaaacatttgaaataaagtattagcaaaataaatctagccacgtgtttaaaaggtaatacactatgatcaagtagagtttattgcaggaaggcaagggcattaaaatattaaaatattgtataatattaacacattctgagataaaaactacatgattatttctctttttttggggagagttaggggcttcgtattgtatttatacaaaatagcatagggagatgcctgcccatgtggacagcagtccaagttttatacagttctttggtcttaaaagttgatagacaaaagtctttattctggggtctttagaggggactctatgggtcctgtgccttggccttgacctcgttactggccattggttgccaaagcttagtatgttgacagtatggacagctgggaaagagactgggatggatggtgtgggtgatatccagttcagggctggtaccttttaagagtaccaatttgattactttgggcttgaggagcacctttttggcctctgtataggtgctcattgccttggaaatgttggcctgaatcttttcgaggacttttttgttgggcttgttggcagaattatgcattccttagaatctgaatgtcttgaagccatttctgtgccattttcaggactggtcttctgtgatattgttcttggatttggccatatctgtactgctggctgcaactgtgggagttgtggagactggaaaaaagagccccatgttgatttcaatagatgccagcaaagcatttaataaaattttggaataatttccccagaatgtatatggcataatttcctaatccttacttgaatgaagatgtcttttatcttgattagtgaaaggtattttgaccagacatagtattcatggatcataatccttttttttcatgcagcatgtacacgttataccactgtcttcaagccttttgtgcagatgaaaagtctgattctcctttctttataagtgtcttctatacatgcagttttaccatccttatatgccctgagattttcaggtttaatctcacggtatactttatcccttttatatcatgagaaacccaatgctgccagtaattcctgtctttatagttctgtgtttctgcctttctgaccccagttttttctctttttttggtcttattctttaaagtaaagatcttttaccttattttgcaatagcatgttaacagttttggtctgttatatgggcatgtctttctggcatgccttcattgtctgtagggatattctactcctattctctcatttcttatactagcaacttcgtatgagattaaccttgatacttttctgggactcatttttatttgaaataaattttaaaaatattttagagtgtggctgggtttaggaaagcattttttaaatttacagagctttctcttctcttgcttttctgtacttttaaaaaatgtggcaaggcagggcacggtggctcacgcctttagtaatcctagtattgggaggctgaggtgggaggattgcttgaggccaggagtttggaccagtctgggcaacaaagtgagactttgtatccacaaaaaattttaaaaattagctgggtgtggtggcacatgcctgtggtcccagctacatgggaggccgaggcaggaggatagcttgagcctgggagggtctaggctgcagtgagtcgtgttagcaccactgcaactccagcatgggcaacagagtgagaccctgtctcaaataaataaatgaatgaatgagtgaatggcagcttgctttctgagatttcctggccttattctcctccactagtttggcttgaaccttctctttccttcgtctctcttgtctgaccccagttttcaccactgtgtgactctgaaacctttcctctgtgccttttagagtttattgtcagtcacctgtaaaacaccgtttctttttaacctcttctctaaacaataccttgatttccttactgtacctgaaactgagctctcttcctgagggcactccttcccctgaagagttctttagtggtggctcctcctattgggaacagagatgttctgtttgtttcttattgctgcatctagacttctgggctctctcccactactccagtcatgtagttgttggtgatttcaggatccatacagatgcttttcatataggttatctgtaatctgaaaatccaaaatctgaaatgctctaaaattagaaactttttgagtgctgacatgacaactcaaaggaaatgttcattggaagatttcaggttttcagatttgggatgctctgtggtacatatattccaaaatctgaaaaaaatttgaaatctgagacacttctggcccaaagcattttgggtaaagaatacttaacatgcaatactctggcttcctgacttcctctcctccattgatttatcttagccattcaactctgtggcatatcctgtgcagatgcttttaaactctcagggcatctgcattaactggggagctttgaaaaactatagatgcctaggactcactcccagagattctgatttctttatcagtttctgacattttactctccacctaccacctcctatttttctggcttacttctagtacccaagagtcttaattctttcatctcactgggactttctcatttgccaccttttctgttacatcgtaccctcatatcctcatttccttttccaactagctgagttcccaaagcctgtcattacacttgctcttctgagtctactttcaaccctcttgacttctctccctgagttgttcttgcttggccaaaccttgatgaaaaccaactccatctgttttatacctgtatacttgtaggtgaatatggctcgagcaaacagctatgttgactttcaattcttggctagtacttaatgactttaagttcatggtttagtgctgcccagctgtcttgttaactctagttctttcacgttcccattgcttagatgattatatctttcccttgcattcacattgtcagtatttccattccatcttctctctcagctgatgaccttgctttctgtttcattaagaaaatagaaataatcttcccaccacctgcatctttaccaatcttattatgaaataactgtctttttctctgttgaaggtcatttccttcagttgtccattagaacctaccccccctcaccttctcaaggatatgttcctgtaattcttcctcttttctccttttctgcattgctgtgaacataactctcagaccactagacctattattccccatttgcagctttcacattattctccttctttcttccctgaaagtctctagctttgtatctcatgtcatctgactatattacctacaacctcttattgttgttgactgtatctcctggttcattgtagggcattccctacaatgatttctgatactgactaccttgaattaggccagacttcacaagttaagggcacagtcctccgtaagactactcttcaaacactagctgcaaacttgggggatttcagaggcaccctcatttttgagcaactagctaaaatttagggattcttgctactccctcacgtttgataattcattagaacaactgatagaacaggaaagcactgtaggtttgattatggcttaattgtgtcataaaggatacaaatcagcatcatccaaaaagagacacataaggccgggagactcctaaatgtgaagcttctgatgtcttctccctgtggagtcaggatacatcaccctcctggcacaaagacatgtagcaaatcatacgttgtttacacagtgtccacaatcttctgtggcatttcatgtgtaagcatgactgattgaatcattggccgctgatggaagtaagtcttcatctccctgccccaccttggtcagtctcctatgggtcaaaatctcaactctttaattatgtggctgggttctctagcatagccagcacctatcctgcatcattttattaccacagactatttagggacctatcatgagtcatcttgttagcataaataatcagagctcaccatgaataacaaagacactcaggaaattcccaggatttagagactacctttcaggaactggggacaaaggttcagcaaaattctctattacacaggattccccctttatacttaaaaacaaaaaaattagttctccccaccttaccaatactatttctaatgttaattcttggtaattttgatcatgtagatattttttcaacattttgatctttcagtcctttgaatttatttccttcaatgaatttgtcttccaatttacctcaaccattcactcccatagtcataccctagatcttgactaatagctgcatcctccccataatttcagtttcatgcatcccaatctctgaccaccacttgctgtctttcagtctttctccctttagtaccctgactccaataatcctttaatcccactaggacctctaatgcgttgttgctaccaccatttttcagcaccatttattgaagagatttttctgcaatgtatgttattggttttttgccagaaatcagttggctgtagatatatggattaatttctgggttctcctatctgttccactggtctatgtgtctgtttttatgtcggtaccatgctgttttggttattacagctttgtagtatcttttgaagtctggtagtgtgatttctccaacttcgttctttttgctcagaattgctttggctatttgaagactgttgtgattccatgcgaattttaggatttctttttcctatttctgtgaaggatgtcattggtattttggtagggattctattgaatttatagattgtttggggtaatcattttaacactcttcttccattagcataagacatttttccatttgtttggatgctcttcaattttgttcatcagtatttcgtagtttttcttatagaggtcttcaactcctcagttaaatttctttctaagtattttatattttgtagctattataaatcgaattgccttctggattttttttagctagtttattgtttgtgtatagagtactactgatatttgtttgaattcgtttgaattcgtttattgaattcgttgatcaattttatgagtttttggtagggtctttaggttttattttattttttattttaatttaaaatttttttgcatataagatcatgtcatctgcaaacaggttcagtttgactttctcctttgtaatttggatgccttttatttctttttcttgcttgattgctctggctaggaattgcagtactatgttgaataagagtgaaagtgggcattcttgtcttgttctagttcttagaggaaaaactttgagcttttacccattcagtatgatgttagctgtgagtttgtcatatatggcctttactgtgtcaaggtacttccttttataccttatttattgacagtttttttatcatgaggggatgttgaatttttaaaaatgctttttctgcatctgttgagatgattgtatggttttgctcctttattctgttactgtgatttattacatttaataatttgtgtatgttgaaccataattgcattcctgagataaatctcacttgattatggtgtattatctttttgatgtgttactggatttggtttgttagtattttgttgagaagttttgcttctatgttcattagggatattggcttgtagtctcctttttttgttgtgtctttgtctggttttggtattagggttatgttggccttatacaatgagttagagagaattccctccacttcaatttttggaatagtttgagaactcttagtattaattattctttaaggctttggtaaaattcagcagtgataccatctggttctggacttttctttgctgggagactttttactgattcaatttttctgattactgattcagtctcagtgcttgttggtctgttgaagttttctattcttcatttggtcttgttagcttgtatgtctccaggaatttatctatgtcctctaggtttcaaaatttattgacatatattcatagtagtctagtgattctttgtatttccgtggtatccattgtgatatcttctctttcattttttattttatttgagtcttctctttttttgttagtgtagctaatggtttctcaattttgtttctgttttcaaaaaaccaaatttttgtctcattgatctttagtattttttttgtctctcaacttcatttatttctgctctgatcgtattctttccttctgttaattttgggttcggcttgttcttgcttttctagttcctttgagatgcatccttaagttgtttatttgaaatctttctagttttctgctgtaggcatttatcactgtacacttgtgtcttaatactacttttgctgtctctcataggtttttgtatgttgtgtttctattttcagttgttttaaggaattttaaattttaattcttatttttttccttcattcattggttgttctggagcaggttgttttatttccatgtgtttgtatagttttgaatgttgctcttgtaatttttagtttcattctaaatatcttgtggtcagatatttggtatgatttaaattaaaacaatgttttagacttctttgtgtcctaatttggtcagtcctggagaatgttccatgtgctgttgaaaagaatgtgtattctgcaggtgttgggtgaaacactcttaagtgtctgttaaatccatttggtctgtggtgtagtttaaatctgatgtttctttgttgactttgttgagtctgtctagatgaactctccagcgctgacagtgggtgttgaaatcagtctaatgttgataaattcccatagttttggcttgtctgaagtattttatttctttcatctctaaggatagctttgttggacataatattcttgactaccagttttctatttctttcagtaatttcaatatatcatctcattctctcctggcctgtgaggtttcttctgagaaatctactctactaagactaatggggattcccttatatgtgacttgatgtttttctcttgtttttagaattctttttcttttacttttgacaatttgactgtaatgtgcctcagacctcttcggcttgaatctgtttgtggttctttgagcctcctagatcttgatgttcatctctctcctaagatttgggacattttcagctactatttcatgaaatatattttctactttttttcacatttcctttccttccagaatgcctatatgctaatatttgctcacttaaaggtgtaccataaatcctataggctttcttcattttttaaaattatttattgtcttctgtgttatttcaaatgacctgtcatcagagttcagaaattctttcttctgcttggtctaatctattgttgaagctctcaattggattttttatttcattcattgaattcttcatccatagaatttgtatttggttctgtcttatgatacctatctctgttaaatttctcattcaagttatcaataatttttcttattttgttgaattgtctatctgtattctcttgtatcttgctgagtttacttaagattattatttttgacattttgtatatttccttatgattgagacctgttactggagaattattatatttctttggaggcatcatatttccttgctttttcatatttgatgtgtccctacattgatttcttatgcatctgattgtaaagtcacctcttccaattttatggagtaggcttcatagggaaagacttattcatatgaatgggtcttggcatgacggttaggtggggcatgttggctctatttctgggcagatgctgtagtgtagtgtccatgtagtttcttcagctgtaactcatgctagttatgtttgcaaatgtctctttggcctaggctgagagaatttttggcagtagtggtgtggctttgccaggggtaggctcactgggctgtttctcaggttggaggtccctgtgtgcacatagtgggttggctaacttggggctgggtttggaagccggggacattactctggctgggagcacatgcatttggctgctcagctggcctgggacgtgcctgccaggagcagccttcagggttatttctcatgcccaggatgcaagcacacacctgcttggctgacctggggatgtgtttgctgggggtggcccatggggctacttctctggcccttgatttgggtgtaagctgctggtctggtccggggatatatctgcttgggtggaccacagggctgtttctcaggcctgtggcacaggtgtccagctgcttggctggccagaggcttgtgtttgctgggggtgacctgtgaggctgtttcttagacctgaaacacaggcgcatgactgtatggctagcccagaaggggagggatgtctgctaggggtggcccacagggctgcttcaaaggcctggaatgcaagtgaacagctgctcagtggaactgggggtatgtctggcaagggcagcctgtggggctgcttctcaggcttgggatgcagatgcgtgattgcttggccggcctggggtattaccagacagagtggcctgcagagctgttcctcaggcctgaggcatggttgcacagctgctcagcaagcctgggatcatgtctaccaggagtgtctcgaagagctatttctgaggccctgactgcaggtgcatgtccattgggttagccatggccttgtctgcagggaatggtgcactgccgggctgtttctcatgccctgcatatgaacatgtagctattctacaacatatcagctactcagagacttgagggcctctcccgctgggggagtacatgcaacagtttgggcagctctagggcaggttcatcctgggtaggactgccagactgttcctctggctataagtgagagcagtgggagttggttctttgctgtgcaggaccagagtcacagctattcctgggccccgactttgtgctcctggggtcgtggtgttcagccactggtgtggaattcgtagtataaagatggagcccccgtgctggagaggtgcagtggctactggcccccagatgagggcgcacttcagaggtggccctggtctcaggatagcaccatgttgcagtatctgggttcacagagcgtgaatgggggttagggagtgcacaccttgtgctcctaatctaggaactgcatgaattccctgcagctcttctaacgggggtcagggcttgtgaggactataggagtctcctgttgcaaggactgtagatatttgtggtggcagtggggactagtggggttcttctgcctaccttttccctgcaacaggaagtctttcctgactccaggcagatctgatccaggtgggaagatagggctacagaggctgggtacctccatgctggtctcctggacttccagtcacaacgggtgcatcttcacaccctactgtaccccagcactctccctttgacattccagtcaaatcttagctgtttgttgccttggtcctttcttgtggtgggtgggaagtgcagaggggcaaggagtacagggaaggggtgcaggggacgagcattaggtgtctctagtcagctatcttgctgaagtcactgagttttttttgtttgttttgtttgccgtagacttaatagaaattccagcagtaacatgattaaaaaggcatgttagaagattaatatattccatattaaatatagtaagtttctgctaaacacgatctttttgatttacctatgatatttttgcttgatgagagtaataatttttattacaagataagggacagatatctgggaaatcagattactctgttttcaagatgtcttagactagactgactttattttattttgagacatagtcttgctctgtcacccaggctggagtgcagtggtgcaatctcagctcactgcaacctctgcctcctaggttcaagcgattcttctgcctcagcctgccgagtagctgggattacaggcgtgcaccaccacacctggctaacttttttttttttttttttttttagtagagatggggtttcgccatgttcactaggctggtcttgaatgcctcaccttaagtgatttgctgacctcggcttcccgaagtgctgggattacaggcgtgagccactgtgcctggccaagatggagtttcttgctctaattacgttttttgtaggttttcttcacttaagctttgctcacaccataatgaggttttctctgattgtttgttgggattagtaatggcattcatgcaagaatggtgtatgaagtttatgaagtttaaaagcagtcgatgtacagtgagatcatgtattaaggcatggtaacagttgctttgggttacagccaaaagtaggcaaatcaggaatttggaagagaataaagaacggaagcaatttttttagtgttatacaattagggcaaaaataataagatgattctcaccgagtatgattttagatgccccagattttcaaaatcagcactcaggtatggctttgaaactttcagaagacaaaccagtactagctgcagtttttcagcatgcccaggaactgagcattagacaccaaaagaagcaagattagtgttctactttcattcaggttggagaaaaggagccaaagattttgtataaagttccccttgtactttatttctgggatgtgaaaattattttacttatgcaaaagcatatagtaagtacttgacgaatatgtttacttaaacctctaaataatcccctctctcttataaatttcctttacactttatctttctcttgtgatacctagcaccttctagtttgaattttacttgagctcacttctctttaattctcattaacggactgatgcttcttttaggcagaactgcttgttaaccttttaaaaaattatctgcagtacctgctgagggccttatacttagtttgttctcagtaaacagtgaacagatagaagatcagaagacattttgtttttaaaatttatagattaatattagaaaaagatttgaggcggcattgccatctgtattcatgcagtagagaagtgtcgctgagtgcaaaagatataatttgcgaagaattttcactaacgtgtttctaaaataagttttttgctgtgttagtgtgttttggttgtttcttgatgttatttataagaatgcttagtgcctggacttaatcctttaaaataacagtttaattttaacttcacaggcatactaaacctgttcattatgtgcttggagaaaccaagggaaggcgaatgatgcaggaagtagtagtggtagttctatgtattcttcttcattagcccttttactgaactggcgacaaaagaattctgtaatataactttaaaatattttattagataatggctgtggtcattgatggagctaatccagctatctagagaaaagccattcctgcaaagctcatagaataaaaaacacatgcttttttttttttttttttttttgagacagagtttcactctgtcgcccagcctggagtgcagtggcgcaatcttggctcactgcaacctcgtctcctgggttcaagtgattcttctgcctcagcctcctgagtagctgggactacaggtgcgcaccgccacacctggctaattttttttgtatttttagtagagatggggtttcaccgtcttggtcagtctggtctgctcttgaactcctgacctcgtgatccgcctgtctcggcctcccaaagtgctgggattacaggcatgagccactgcacccggccaaggcatgctttttggttagagaagtttggtgagtaaaaactaataaaggatggttgagcaacttagcgatgatactaatttactgggctagaaaataccagaggagggttgttcatatgagaggcctggagtgaaatttggttatccagatgatagatgacagcaaaggcaatggatgaactaggaggagaggacactgaaaaaggaattaattaattattgagagagtctcattctgtcacccaggctggagtgcagtgacacgaacagagctcactgcagccttgacctcaggcataagcaatcctcccacctcagcctcccaagtaactgggactgcaggcatgtaccatcattgctggctaatgttttttttttaaaattttctgtagagatcagctctccctatgttgcccaggctggtcttgaactcctagctcgagtgatcttcccaccttggacccccaaagtgctggaattacaggtgtgagtcactgtgccctaccatgatttttattttttaaagacgggagcatcttgaaatgctgatagaaatagctattaaaggatgagtttcaaaatatagaagtcaaaatataagaggttcctgggtgaatgagtgggagtgggatacagagcaaaggtagataatttgacctcagagagaaaaaggaatatgtctattttaataggaggagagggtgtgtgttaatgggcttaggtctgtaggtttgttggtgggtagttgacagagttctttctgataatttttatggcatgtatttttctttgtgttatggaagctgaaaatatgggttgagagtgatgcaaagaaatgaggtcagagaatgttcacagggaactgactaaaaaagcagtagattgctaagaggtgaaaagggtcagttgagatttgcaagcatagatttctgacatatttggtatatcactaactaatatgactttttttaacagtgttcagccgccttggtatagttggaatcagcttgaattttgatttgtattttatgtggaatcagagagcaaaggggcaagggagtttgggggtttggtgggagagtgattgaaatgacagatcattttcttgtgggaaaaattagtaaatacaaaataatattaaaaaaacaaatgaaatgatgaattttatgcatgttttatgcatgttttcttgtgctgttgcatgccaagtttgaccctctgcgtgtgtgggttctgtgtctgccagccatggatcaaaagtattaaaactaagtagataggccgggcagggtggctcatgcctgtaatcccagcactttgggaggccaagacgggcggatcatgaggtcaggagatcgagaccatcatggctaacacgacgaaaccccgtctctactaaaaatacaaaaaaattagccgggtgtggtggcgggggcccgtaggtcccaacttctcgggaggctgaggcaggagaatgccgtgaacctgggaggcggagcttgcagtgagccaagatcacgccactgcactccagcctgggtgacagagcgagactccgtctcaaaaaaaaaaaaaacaaaaaaacaaacaaaaaaagctaagtagataatacaaataaatatagtataagtatttacataacatatacattgtattatggttataagaatctagagcaaaaacaagtgaaatgatgaatccaggattccagttgagagagagaggaattaaagaccagaggagactgactaggaccctaaagccttgattttcatctcatttattgaaagcacttcttaatgtctggatgggtggagtggtggaggggagttttacgcacggtttcttgtgttgtttcatgccaggtttgaccctttgtgtgtggggttctgtgtctgccaaccatggatcaaaaatattaaaaataagtagataaataatgcaaatatagatacgtatttacatagcatttacattattaggtgttataagaatctagagatgatttaaggtatacaggaggatgtgcataggttatgtgcaaacactgtatcattttacgtaatagacttaagcatctgcagattttggtatccatagggtgagtgtatggggcaagtgtggggctgtcttaaaatgaatccccagcagatacccaaggatgattgtatgcgcttatctttccctatagcaatctaactagaaacctttagggttgcatagacaagattgagtataagatttatgtttctgtatcccttgcatagccatggcccatcccagtgtaatagttcttatgtgatatgttgtgagattctgctgtcctctgaactcttcagacatggtataaatttttgatcaatgtataaagtgtctttttgtcataatgagtatactattagtccagtattttttgtttcactgatttgttaaatgatatggaataacttactgtaagaaaaagtgtagagtcatttcagtgccaaataaaaaattcaggtgtttttattgagaactgagaactttactcttacatataaaaagatacatataatacagtaaatgattcttaaatagcaacatagcatttggatcaccacattaatagtgtgacaactcttcatgcttttatagacacttgagacattgttatatgcttctgtaacatatgacatatgtaactatgttatacatgttggctactattataatttgtttcctattgctgctgtaacaaatttccacaaatttagtggcttaaaacaacacaaatgtactattttaatacttcttacagttctggaagtcagaagtttgaaatgagttttttatggggcaaaaactaatgttttggcatacctgtgttccgtctggagactctgggagagaatctgttttttaccttttccagcttctggaggccatctgcgttacttggcttgtggctacattgctctgatgtctactttggtcatcacatctcctcttctgatgcttctacttcccttttccattttttaatgacatttgtgactacattgggtctgcctgggtaaaattcaggaaaatctccctattttaaggtcctcaacttaatcacatcttcagagtccctttgccatgtaaggtaacattcacaaattccagaagttagaatgtggtcacctttggggaacctctattgacttggtttgattttgttcttgctttttaagttttggctattctgggtcccttgccgtttccacattagtttttagatcactttctcaatttctgaaaggaaagtagctgggagtttgttaagtattttgttgaatctacagatcaatttggagactattgccatcttaccattaagtctttcaatccatggacatggatgtctttccatttaattaggtcttccttaatttctttcagtgatgttttataattttcagtgtacaagttttatacttttgttaataacaattttttattctttttgatgttattgtaaatgtattttttatttcatttttggattgttcattgatagtctaaagaaatacaactaatttttcaggccagacatagtggctcatgcctgtaatcccaggaatttgggaggctgaggcaggaggattgtttgaggccaggagtttgaaaccagcctggtcaacatagcaagaccccgtctctgcaaaagaaaaataaaaaaaaattagatgtgttagcatgtgcctgtagtcccagctgctgtggaagctgaggcaagaggattatttgagcccaggagtttaaggcatcagtgagccatgctcatgccacgcactgcagcctggatgagtgagagcctgtctcaaaagaaaaaaaaaatacaactgattttttaatgtgtatcttgtgtcctgccaatttgctgaattcatttattagctctaatagttttttggtgtattctttaggattttctacatatgaggtcatgtcatttgtgaatagagactgagttattatttcttcctttctaatttggatgccttttatttctttttctgcctaattgccctgaatagaacttcaagtacaatggtgtatagaagtggtaagtagaattttttttttttttgagacaaagtctcactctgccacccaggctggagtgcagtggcgcattctcagctcactgcaccctctgcctcctgggttcctgggttcaagcgattctcctgcctcagcctcctgagtatctgggattacaggcatgcaccaccacacctggctcatttttttttttttttgtatttttagtagagatggggttttgccatgtttgtcaggctagttaaatggatgattttttcttgtccaacttaggaggaaagtgttcagtttttcagaattaagcatgatgttagcctcaggctttttatagatgccatttatcagactgaggatgtttctttctatttctagtatgttgagtatttcttttttaatcatgaaagggtgttgccttttgtcagatgctttttctgtgtctatggaggtaattattaaagtttttgtctgttactaatttggtatattacattgattttcatatgctgaaccaaccttgtattcctaggattcacttaccagttcttgagtttgagaaaattaatctagggtatggtcatctgaagactcatagtctgagatttcccttagatgattaatttcacctttatcaatagaatctggagtactgccatctgtctttttgcattcttcttctgataaaataattgtgatacatcttcctctggaaatattcttctctttgacattttgggtagaaaatgaaaattcttgtattgtttactgtgttaaatgaagagctttaacaaaggctacaaagctgatgtgtcatatttcttttatatcttcttgaaagatgatgcaatactttgggcaaagcaataagaaaactgaagaaggatgaaacggttatcacttatttcattattacgtcacttttagataaatccatcatgtttccattttctttggatttttttctttcttttacagtttacatgcattgtagaataataaagccgttcttttcaagaccttttataaatcctgttatcttgtctggctggctcacattgtttcctgggaaggccagcctgcagtggcttagatagtgttgacagttgtagttggtttggagtggacgaacaagggacatagtaattcttagctcataatgtaaggatccagaatcgggtggattgagaactcagttgtaaatctatctggaaatatttgataagatattttataaaatacttgacttagttgaaattcagaagttaggcaatttagtctaatggggaacaaggttggtggagggtgttgaggtaaagaaacactgggtcagctagctcccagtattggccaccagatggccctggcagtttaggtgctgtatgaaagagctttgaaggggtagaaagagaaagcagtacatgacctgataataagtattgcaaaaatgaggattcataattgaagcagtgcttgtactacatacaaggctgactgtggaacccatcatcagttacttccctttctcaagacttctttgttaattgtcccatttccttcctttgccctccagtcttgaaagagattgcataatttgaagctcttcagtgcagttcaaaattttgcttttagggaaattatcaaagattatcagctgggcatagtggtgtgcgccggtagtcctagctactccgaggctgagatggaaggatcctttgagccaggagttcaagaccacaatgaacagtgatagcactgctgtaattataagaacttccaaagttatgtcctagaatatatctgaggcatctagcaatttatctcagtcaacacttaaagaaggcctttcttgataattattagtccttcagcatgcctttcacagaggaaaaaacatgcaatttccagatggtggacaaatgatttgtctttcttgtattggcttgatcctattactgtatataactttttttgaaacagagtttttacgttttccagaagcctcaaattcatgctagatttgtgtttctgtctagtattctcatcattcacactgttcaagcaaactaaatatggcctgagaaggactccgtacttctatatttgagtccttgtggacaaactgtaacccagcttaataggcagacaagattaaaaacctcacttaggagtacgcgcctgtagcaatagcggagtcttagcaaatcccagcagccatgtttcaaccactcatagactgctgtgtgttcaaataaggcaaatgccaacctgtaaccagtgcagctgtttctgtacctcacagtcgatttctgtccgtcacttcccttttttttttgtctataaatttgttctaaccatgaagcatccttggagtctccctgaatctggtgtgattctgggagctgcccaatttgtgaatcgttcattgctcaattaaactcgtttaaatttaatttggctgaagtttttcttttaagaacactattgcatttgtcattggttgtttacttctcccagtatgattaaatacatgctcttttgagttcttccattcttctctatttctctcttcgttttttttgagattatttgtgattgtattttttagagcctctcatgctttcagcagatattcactaaattttcttttctttttctttgtttttttttgagatggagttccgctcttgttgcccaggctggagtgcagtggcgtgatctgggttcactgcaacctctgcctcccaggttcaagtgattctcttgcctcagcctcccaagtagctgcgattacaagtgcgcaccaccacgtctggctaattttttgtatttttagtatagatggggtttcaccgtgttggccaggctggtctcaaactcctgacctcaggtgatctgcccgccatagcctcccaaagtgctgggattacaggtgtgaaccaccacacccagcctctttttttttttttttttttaaagagaaaaaaaggacagagtctcactctctttctgtcacccaggctggcgtgcagtggtgtgatcatagttcactgtaactttgaacttgtggtctcaagcagttctcctgcctctcagcttcctgagtagctgggactacagctgtgcaccaccaatattttcatcgtgtgcattattaaccctgcatcttatctgtaatgtttaaaaagttattggaagtgtttattaaatgcattagtgtgtgtgtgttgtattctcctgcagaaatttctcagaggagaagctctatgttgacaaatgctagaaaatggatagcatttactttaaatatatgtagcttactttttataattatatgaacagatttgtattcaaaaggactctgaaggtcatatccaaattattattgtggagaaaatcataaaaggagattgtatggattgactggaaagataatacttagttcatcatttggatcagtttgtggtcatatttttataattagagactttaagacaatatcttaatgtattactttacattattttcaattttcttactatttaaaatattttcttcaatctttaaactattaaagcattttaatggtataatttatttatttggcatagttctaatgtcaagaaacttgtttctcagactggaaaccaggtcaaaaataagaataagccaatccaccacaaaaccaaaaatgagaataaaagtaatataaaaccatttaagcaggaagtagatatagaaaaagatattttttaaaaagctggcaaacaggctgagatgacagagaattcagaacatggttagaaatgaagatcattgagattcaggagaaagtcaaaacccaataccaggaatatagggaatactgtaaaatgaaacaggagctgaaagatgaaatggccattttaagatccagagtgattgcatagagctgaaaaactcacttcaataatttcataatacaattgcaaatattaacagcagaatcaaccaagctgaggaatgaatctcagagctagaagaccagttctctgaaataactcagacaaaaataaagaaaaaccaataaagaagaatgaacagaatctctgagaaatatggggttgtgtaaagagatcaaatttatgactcactggcatccctgaaaaagagggagagaaagcaagcaacttggacaacatatttgagaatgtcatccatgaaaattcccccgacctcactagagagggcaacattcaaatcaggaaatgcagaaaatccatgtgagatgaatatccccaagacacataatcatcagatcctccaaggttgaactgaaagaaaaaaatgttaaaggcagctagaaagaaggggtgggtcacttaaaaagggaaccctggttaacagcagacctttcagcagaaattctacaagcaagaacagattgagggcctatattcagcattcttaaagaaaagaaattctaaccaaacatttcctatgtagccaaactaagcttcataagtgaaggagaaataagatcctttgcagataagcaattgccaagggaattcattaccatcagacctgccttacaagaggtcctcaagggagtgctaaatatggaaaagaaagaccattactggccaccacaaaaaacacacttaagtacatagacagttgacactgtaaagcagctatacagtcaagtctgcatcataaccagctaataacataatgacaggatcaaatccacatatatcaatatcaacacacatagagtcaaagtaaagggatggagaaaaatccatcaagcaaattgtaaacagaagaaagcagggattcctattctaatttcagacaaagcagactgatatagtttggatatttgcccctgcccaaatttcatgttaaatggtaatccccaatgctggaagtgcggcagggccttgtgggaggtatttgggtcatgggagcagatccctcatgtcttggtgctacctttacagtagtgagtcagctcttgagagatgtggtcatttgaaagtctgtggcacctccccccaacacacactgtctctcactcctgctctggccacttcatgtggctgctcctgcttcacctgccatgagtaaaagcttcctgaggcctccccagaagcaggtggtggagctgtgcttcctgtacagcctgcagaactgcaagccaattaaacctcttttcttataaattacctagactcaggtatttatagtagtgcaagaacagcctaatacacagactttaaaccaacaatggtcaaaagagacaaaaaggcattacataatggcaaaggattcagttcaacaggaagacctaactattttaaacgtatgtgcacccaacacaggggcacccaaattcataaaacaaattacttagagacttagataaccaacacaaatttgtaagctttcttaaaacattatgagattttttttgtaacttttttttttttagctaatcaactattattagcatcaatgtgttttatgtgtggcctaagataattcttcttccactgtggcccgggaaagccaaaagattggacatccctggtatatgcccaaagcaatgtaaattgttctaccaaaaacgcatgtgcttggatgttcatcatagctctgttcacaatagcaacatcatgaaatcaacctaaatgctcatcagcggtagactggataaagaaaatgtatatatgcaccatgtaatactatgcaggcataaaagaatgagatcatgtcctttgcagcaacatggacagaggagctggaggccattatcctaagcacactaatgcaggaacagaaaacaattactttatgttctgacaagtgggagctaaacactgagcacgcatggacacaaagaaaggaagaacacacaccagggcctacttgaggatggaggggtgtggaaggtgaggatcaaaaaattacctattagatactgtgtttattacctgagtgacaaaatctgtacgccaaaccctgtcacacgcattttaccaagaaaacaaatctgcccatgtccccttgaatctacaataagttaaaataaaaagctggcattagaatggaaatattaacaggatgtcatgatcatcaaaatagtacagaagtacttaatagttaatttgattacattattaattacataaacatttttatgcatgggatgttttactttttttaaacaacaggataagaaaagggctttaaatatacaggagggatgaacattgaaaatgaaaattgattgcctgttaataatatagcagaagaagacattgaaataggttgttgagtctccagccttagtggaccattaagaagtcattacttctcctgaatggtttagaatgagtgtcacaaacataaaagcttagggaccatgtagataacataatgttcaaatcagctaagtgtaagaaaattagaaatgattgggggcctgtcaatggcttgttattttcctgtccagatatttcacttgccagggatgtatctgatgattcctcctgagagagtgaacatcttaaaatttggatgcaaaatttggaaaagcagggtaaaatttagatttacattagtgtcaattagaccaaactgccttctcccacttagcttcaatttgtggaatttctatattaatattttattatgatcagttttctattggtatgttaacttgaggaaaatcatttaatcaaaatgtaactatgagatgagtagctttatgttttacttttctatatattgaagtaattaaaaaagttttagaactagcaaaaaaaaaaaaaaaaaaccctctatatcttcaagaagtagccatcactataatttatgccacccaccaaaatattttacctaaatcaacttaagtatgttctcctggtctttttttgactcttagtaaattttaagtaataagttgctgtttttatgataatgataatctgcactcatttttttcctttcaaaactttgaacaactatgtgtaaataatcagagtttgagttagaagttctaagtaagcctagaatattcttggttttccctcagataaaattttgaactattcctacaattttcatgccttttcttgattccctggtacacattcattctaggtagtcctcattgttctggttgatttaaaatcatttctcgctcaatgaaacttacttttattatgccccttctttactaagtcagtaaatctgatgaattgtgtctttgctcagtttatttactcattcaagaaatgttgagagcctaccatgaactaggtgttgtggttaaaaagattaataagaccaggtttccttttcgtttttcttttcttttcttttttttttttctttttctttctttctttttttttttccaagatggagtctccctctgttgcccaggctggagtcctctggcagctcgctgcaccctttgccatccgggttcaagcgattctcctgcttcagactcccaagtagctgggactacaggtgcatgccagcatgcccggctaacttttttgtattttttagtagagacagggtttcaccacattggccaggctggtcttgaactgctgacctcaagtgatctgcccgcctctacctcccaaagtgttgagattacaggtataagccactgcgcctggtcaagaccagatttctttataagggatttgatatggacaatggtatacaaacaaaaatatgtaattgataaattcagcaaatatttagcacttcctgtgtatcaagtattattttccatttacagggctgtagcaatgaattaaacaggcatcttctcttccctcctggagcttatattctagtagggaaactgataagacaatcaggtatataagatgtcttttggaggtaagtatttggggaagaacacataagaagttatgggtgacggttttggagcataaatcataccacagagttgccctcccctggaattaaggaagctggtcttttgtatctcaatgattaataattagtcattgactgagaacctctctagggtagaagtagtaaggcatgaagctttctgggcaagatggtgccagttagccaaaggcagttctctggagaagtgggggagcatctccaagccattaacagctcagttatttacattttaaatagttttagttatcgcatgtatatccactacttacagtttactgttaacattttattttgttataattcatcacatatctgcctctctatgcctccatcagtccatcaatccaccttattttttgatgcatttcaaagtaataatctgcagacatctatatgctttctcctatttaagcatgaatatcattaagtggattttagcatttgtttacatttttcatttgaaaaaagtaatcatcttcaaaacatatagaatattaccatcatcctagaaaggttcctcgtgccatttctaagttgatccccatatctacccccaagagacaaccattattctgatttttttggcatagattattcttgaagttggtataaatgtaataatgcaatgcatatgcttctatgtaaaggttctttcacttggcatattatatgttgtgatttatctgtgttgactgtatgagtagttcattcctttttcttgctgagtaatattcctctttgtgaatatcccatagtttattcgtctgttgatggacacctagtctaggtatagggtattataaatctgttatgaaaattgttgtactagtcttttcattatgcatatatgttttaatttctcttgggtaaatagtagaggtggagtcatgcattaggtgtacagtaagtttcataataaacagctatatttttctccaaagccattgtaccattttatactcctaaaatagtgtgttggaatttaaattactcttcattgtgatcaatatttgatattgtcaaactttttaaagttagctcttctggtgggagtatagtggatagctaattataatttgtatttctgcaatgacatataatgttgagcccttataatttgggtgtgggtcatttatatatctactttttgaaactacctgttcaaatcttttacccatttgaaaatcgattgtctctttattactgagttgtaggtgttctttatatacagtagtccctccgtatccacattccaagacacaccccacagtggatgcctgaaatgacagtaccaaatcctgtacacgctatatgcagtaactgatctgataaccagggtggctgctaattgaccagtggtcaggtggcatatacagcttggataaactagacaaagggatgttttacctcccaggcaggatggagcaggatggtgtgagatttcatcaggctacttagaatggtgtgtaatttaaaacatgaattatttctgcagttttccatgtaatatttttagactgcaggtaaccgaaaccatggaaagcaaaactgcagataaagggggactactgtatcttggatgtaagtcctgtgttatatatgttttgtgaataatttttcccagtttgtggcttgcctgttttctttaatgttatcttagcagatgtttttaaatttttaataacctccaaatatatgtttttttaagtggctgttgctttctatgttcctaagaatcctttgtctacctgtaaatagtgagacagtctgttttttaatttgtttgttttttttcaaactgtactctgctttcttgaagatacttcccagaaacagtcatggtatttcaggcaggacatgggcagacaatcattaacagtgtacaacaactttcagactccttctttgatggaccaccaaaaatcagaaagccactataaaacccatgaagtcttcatttgatgctcagaacagggaaagtttagagggagggttgacatttcacatttagctgttgtttaacaacttttcatgagccagccctgactttcaggtagcgaaatgaaaatggcaaaatttatctgaagatcctcaactgctgctcttttgaggggcgccatctcagtggcatcactggaaggttcagattgcctgacacactggtaaccaattactggggctcaggtcccaacaggtgtttgggcctaaggagttaagtctgtgctgaaggtggaaagggagaagaggacgtaagaatgaatttgttttttcataccacgtggcatttgtgccaaggtggctatgtgtgtcaaagtcaggaaatccttcttcctgggagccaagaggaagtttcttaaaactagaagggaaaaggtgttttccttacatcaatccagctttggatacattctagtagtgatatatgcctcttccccaaaaagcaacaatgaagtgttctgtgtgctaacagcatagctttaaaaaaaaaaaaaaaaaaggaaaacaaaattctgcatttatataaaacttgataaaaaatagtatttcaaaccgtacagtcaccagaggtccacagttgtcaaaaatgcacacacttcacttggtatctccggcagcttcagctttcagtgcctgctctgttttggcatttccattttctgcagggttattccccttacccgctttgggtaccttctttcctttctttaccaagggccttttttggctttggccctggttttagaggagcaggtttagcagacaaccttgtggattttctctgtggtttatccttcacattggctttatctcgtttagtatctatccccttcaatccttctcgtgggcatggtggcatcagtggtgggatgtgggcactgatcacagggatgcagtgactcacgggctttggttgatctggaggttgttgttgccttcttcttcacactgctctgaatttttttaaaaaaaatctttataattttagcttttatgtgatgtttattttgaattaattttaatagcatgatatataggtcattttttttaaaaaatgcattatctctttgtttcaccacgatttgttgaaaagactttccttttacctattaatgacttggtcagaaacaaatggccatgtagtgtaggtctttttctggactgtctgttctattctgttgatctacttgttagtacttctgttgataccatattctcatcaacaagaaagagctgtagagtaaattttgaattcaggtggtataaatgcccaagcctttttgttggttttcaacattgctttggtgttttcatttccttgcattatcatgtgtgctttagaatcagctttgcaatttctaaaaaataacaaaaaaaaaagcctgctggaatttgagactgttatctctttagaacaatttggagagaagtgacattttaacagtaagtattcaacttttcaatccatgaacatggcttatctccacttacttaggttgtctttaatggtttttttttgttactgttaagcaacattgtagagttttcagtgtcttttgttaaggatatttctgtgtctatgttcatgaggtatgttggtctgcacttctcttttcttataatatctgtaaggttttgggattaatatcatgcaatacttataaaatgtgtggggaagtatttcctttttcttttattttcttaaataatttttataaaattggtgttatttgtgccttaaaagtttgatagaattcactagtgaaaccacctggctgtatagtttgtgtgtgtgtgtgtgtgtgtgtgtgtgtgtgtgtgtgtgtgtgtgtgtgaagagttttgatcaatttctttaatagagatagggctattttatattttttgctcaacattttgttaattttgacaagttatatttttcaaagaatttatacattttatattaaatgttaaatttggtataaagttgttcacaatatcttattttttaaattaaggatctgaaatgatgtcctctatttcatttctgatattggtgatttcttttttctttcctcaatcagccttggtttagcagatttaatacttttcataaatctgatatgtggctttgctgattttatctgttttgcatttgttttctatttcattcatttttttctttttactcttttccttccttctactttctttgagtttttatttgctgcttgcttttgaaatttttgaaatagaagcttagatactgattttcatcctttacttctaatacatacatttaaggtgtaaattcctttaaaatcattgctttagttttatcctatgagttcccataagtcatttttattatcattcattacaaatatttaaaaatacctgttgtgatttatttactttgttcaacttatgggtatttagaagtatatcacttaatttttaagcaacaggagattttctagattaaaaaaatatttacttctagcttaattgctttgtggttagggaatatactctgaaagatttcaaaatttactgatactttatggcctaacatatggtccattttggtatgtgttttgtgttatagtttgtttttatttggaagagaaatttgcttatatatattcaagtctagttatttaattgtgtagttcaaacatatcatagttttttttttaaatctacttgatcttgtagctattgacaaaggtgtgttggtctcccatgtaactgtggatttgtctgtcaccttttagttttgtatactttttgttttaaatgttttcaggctttcttattgggtccattgatttagaattatgatatcttggctagatgagatggctcacgcctgtattctcagcactttgggaggccgaggtgggaggattgcttgagcccaggagttggagactggcctgggaaacatagtaagaccccatctttaaaaaaaaaatgagaaaaattagtggtgtgtgggagctcacacctgtagttctagctacttgggtggctggggtgggaggatcacttgagcccaggaatttgaggttgcagtgagctataatcacaccactgttctccagcctgggtgacaacatgagaccctgtctcaatatagacaaaagagttatgctatcttcttgttgataggactttttaattattaagaaatgcctttctttagtaatgcatattgccttaagtctactttgcctgatattggcatagtgatgccacctttctttttgttggtgtttgaatggtatatcttttcctgtcattttgcattcagttcatctatgtttatagtcttctactagagtgttgaacatagtaatggatataatttgagtttaaattataaaccttactatttgtcttacatttatccacagatctatgctgctttttctcttatgtcttactttctttggtttagtcaaatgtttttacttattctttttatctcctcagtttgcttttaatgaatatcctagagattactacatgagtttttgagttattgaagtctaacatgaattattacttctcttcttgggtaatacagatatcttagaaacttcaattccattaccctactccttccttttttattgttgtcatgcattttaaatctatatattttaaagaacagcctatcattgttatttttatagtcatttattaatacttaagaacatatttacccttcctatggctcttcctttttgcatgtatatgcttttttctagtatcattttccttctggtggaagaactcccttttagtaataaattatttgttttttcttttgattttcattttgcaaagatatttttaaactgagagtaaattgcttgattggcgccagtttttttttttttttttcagaatttttaagtcattattttttgctattcatcattactgttgaaagtatctttcagtctgttgattcttgctactttaaatgtgttttttgggggtctggctgtttaaaagattgtctttagtttttagcagtttggctatgatttgctcagtgtttttctttgtggttattctgcttgagtttgacaagcttctttcagatatggcttcatgtctttaattaatgttagacaattcttggttgctcacacttcatatattgcttcttcccaattttcacgctcttatgaaatttcagttatacatatgttagaacttttcagtggttccatatgcatctagtactcttttctataattttttgtctttatctctctatgctttggtttggatattttctgttgacctgtgtcccacttcatgtttgctctatttaatctgctggacacaccaagtacttacaacacttttgggaaattttgctgttgagaagagtgaggatataagagcagtcattgaattgtggtggagtaaagagtgggactttctttttgaacaagatagactaaaatatgttcatgttatgattggaatgattcaggagagagaaaaagaattaaagctgtttgagagaaaaggaagatgattttttaaaataaaattcttgagaaggtgagagaggatgtaatccaaagcagtcagagagttttcctttggtaggagtgggacatggaataagcacggattcatgcatagctgtagtcttgtgagatggaattctggcttgaccagtggaaattctgtaggtgctgtaagtttctagaatgtgtgtgtggtggtggggggtgggggggcggtgtgtgtttgtgcgtcaggtaggaaaattgtccaagaatggagagtcaagtgaaaggtagacagtatttatagctacctaattatgttttctattgctctgcatcctcagtgatatctacctttatttcttagggtggtcaaaagtattgtattcttttaaggaattatttaaatgtttaatagtcttttttatcatatagttacagttttgtactatatatttaaacatagttaattatctttttctggtttagcacttttattactttttaattttcatttttaattatgggtaaataatagttgtatatatttatgggggtaaacatagttaattctttataattaattttaaattcttagtattttgaatagacaagttttcttttttctttttaaatttttatttgtttttactttttgtgggtacatagtaggtgtatatatttatggggtacatgagatgttttgatacaggcatgcaatgttaaataagcacattatgaagaatggggtacctgtcctctcaatcatttatttattgagtggcaaacagtccagttgtaccctttaagttattaaaacatgtatagttattgactatagtcaccctcttatgctatgaaaataaagttttcttaaacacattttcctatattttcttttacagttttgcagtagaagagtataaccatgtttcggaatagtctcaagatgctgcttactggtgggaaatcaagtcgtaaaaacaggtcaagtggtaagtgactatgctacatttattgtgcgtgatattttacaaatacaagttcttttagggtcctgaattaatgctgtaacactttattaatgcttaacttagaacttaaaagaaagtttacatttctttgggctttcatacgctttattaagaggtaggaacacttgaatgcgtatcaggaatagtcgaaagaaaggaaaaccttgtgaagaaaaatatttatttctaatatattagagagtaatgtttctgtgcatttgcttattaaaaaccttctagacctaagtttatgtttttgaattaacaaatgaaattattgcaatcctaggcactctttggggaaggaaattataaaaataactgtcctcaaagatttatacagaaagtgaaatataagttgaattttttatagccattaaaataaagtttatgggttttcttttttagaacaaggggttaagtcttaggcttttgaggtaaaactatatatacttccttggtaaaaaatattgaaaagaaatgtattagaatgtttgttttttattaatgagtggtagacttttgtattcttcgtaatcttctcaacttatttttctgcagtttataaatttatattggtactgtatttattgtcattgatttcaaaatgtttctgtaattccaattgtgatttcttcttgacccataagtatttggaagtgtatttaccagtttccaaactgttgctgattttttgtttatcttattgtaagaacaaactcccctacattaacaaaaggaaaactgttttttcctccactgctcacaccaacatttctggccaccaaatatgtgggttttttttttttttcctacagtgattcaattcagttctctggtagacaccaactgtatgtcctacaattcaattcaattctgacgctgtctaccctgagttagcacagaccctatgggttatggtctcagtcctacaagactgctttccacttcagacaccaattgcgtgtggtggatccccaggttacccacaacctctgtccgacttggctacaaatcggaggttcccatgacccctttctcaggttctatcatttgttagaatggtgcacacaactcatgaaaacagtttctttacaagattattggcctattaaagaatacagttcaggaacagtgagatggaagatgtgggtagggcaaggtataggggaaagggccctgggcttccatgccctttttgggtatgccgccttctcaacatcttccatgtgctcatcaacccagaatcccatcgaaccccatccttttgggtttttatggaggctccattatgcacatatgattaattcattggtcattggtgatgaactcaaccttcagcccatctctcctctctagaaatcagacggtaaggctgactctcatggtaggcctccctggcagccagcccctgtcctgaggctattcaggagcccccaggtacctatcattcgtctcgttagcatatagaaaaccacttttatcactctgaagactcagaagttttagagctgtgtgccaggaaatgagcagagacaaatatgtttttttttgttgttttgtgtgtgtgtgtgtgttttttttactacgtcatgcttcttcttattgaattctagcttaattatactattatcagaaaatctattctgtattattttattcttttgatatttattgagatttgctttacagttaatcatatggtcagttttggtgaatgttctgaatgtacctgaaaataatgtgaatgtcacagttactggattcagtgtggatcagttttgttaatgatggcactcaaacatttcatatccttacttaaaaaattatttactgagaaaagtgtgataaaataccacattatgattgtgaattttttttatttctcctgctagttcctgaggatttttgctttgtatgtttggaagctgtcttattaggaacattcgagtttaggattgttacatgttcctggtgaattgacctttttaaaaccactatgaaatgcctctctttatttctaataatgtcttttgtttaaaagttcatttttttctcatattaatataaggactccaggttttttttaattagtatttgcaaaatatgacttctttcatacttttgctttcaacatttctgtgtgcttatgctgttaatagcatatagttgagttttcttttcttttattcagacatttttttttctcttaagaaagtctttggtctgcatgaatttggtcagtcatatatttgggtatctgtgtgctgtctacttggcctatccattctatgcttctttctctcctatctttctttttcctctcttcctttcttttgtgttgatcaaaactttttttttttttttttgagacaggatctcactctgttgcccagtctggagtctaggggcacaaacacagctcactgcagcctcaacttcctttgctcaagcaatactcccacctcagcctcctgagtagctgggactacaggtgtacaccaccacacctagctaatttttttttaaattttttgtagagatgagatctcagtactttgcccaggctgttcttgaactcctggggtcaaatgatcctcatgccttggccttccaaagtattgggattacaggtgtgagccaccatgcctggactcaaaacattttttatgattccatattttcctctattaattttgaaattacatacccttttgaaattttttctgtggttacctaaagattaaaacaatacttagtttattgaagtttgatatttaattgatatgtttaccctcttcttggacaatgcaagagctttagattctcttcacctatctttaacctccacaagacattactgttctatgtagtcactgttacttagatatgcccatatatttgaccttttcattgattttcattccttcctgcacccctcactttctagatagaagtaactttatctgaataacaccctttgttttgttttattttatttttagagacagggttttgctctgtcacccaggctacaatgcagtggcactataatagctcactataacctcaaacttctaggcccaaacttcccttccacctcagattctggagtagctaggactacaggtgcataccaccgcacctggctaattaaaaaaatgtttttgtagagatgagatctcgttatgtttcccaaggctggtcttgaactcctagcctcaagtgatcttcctgccttgaccacccaaagcattgggatttcaggtgtgagccaccatacctggccaagaagactcttttagaatttactttagtgaggagtcatctatgacaaactttacttttgtttatctgaaaatgtctttattttgccttcatttttgtagatttttttctttttttttttttaagagatggggtctctctttgttttccgggttgaagtgcggtagttatttataggtgtagtcctaatgcactgcagcctttagactcccggactcaggtgatcctcctgccttagccacccgaggagctgggcctacaagtggatgctactcttcctggttacttctaggatacttttatgcgagtataattctagggtgcagttattttctttcagtattttacaacgttatttattgtcttctggcttcttccgtttttttctggtgatcagctgttagtctaattgctactcctttaaaggcaacctgccacttttctcttttaaggtttctagatttgtactggtatgcctaagagtatttttttaatctttatcattgaaaaaaatctttatattctggccaagtgtggcagtgcacgcctgataatcctagcactttgggaggccgaggcaggcggatcacttgaggccagaagttcaagaccagcctggccaacatggcgaaatccagtctctattaaaaatgcataaattagccagacgtgttggcacatgcctgtaatctcagctacttgggaagccaaggcaggagaatcgcttgagcctgggaggcggaggttgcaataagccaagattacaccactgcactctagcctgggcgacagagtgagaccctgtctttaaaaaaaaaaaaaaaaaaaaaaaaatctttatcatctattcatgcttttattcattttgtaggatttcttgactctgcggcatgatgtcttttgtcagttttggaaaactattacccattatgtcttcagattttaatttttctctcatttttttttctggaactccagttatacaattgatagaccatacgcatatcatctctgactcttaacattttctcttaatccttttgtctctatatgctttatgctggatattttcttttgacttaccttacatacttttcatacttttctttctgttcctcagattgtgtaatctcaattgacctatctttaaattcactgatttttttcttttgtctgctcaaatctgctatcatgtctactgaattttttttcaattattgaatttttcaattccaaaatttctatttgattcgttaaaaattttaaatctttattggtattctttatttggtgagacattgttctcatatttacattaagttctactgacatagtatcctttagttttttgaacatatttaaaataggcaatttaaagttgcttagtatctccaacatcagggcttccctcagagacaatgtccactgtttgcattttgccccttgtatataggtcatactttcttgtatctttgtatgtcttgtaattttttgttgaagcctggacattttagattatataatgtgttatctctggaaatcagattcttctcctcgccagggatttattgatgttgttttgattatttgtttagtcacttctctgaactaatttttccgagtctgtgttattgtgcatggccactaatgtctttgcttggtttgtttagtggtcaattcatactagacagacgttttagcaaaagcacaaattattacatactagacttttgaataactactgtgttagtagaaattatattattaaatccatacatgttaaggttctactgtagtattatagctaattcctttgattttctgggtatttagttatatcagtaatgatttttaggagtctgattctaatatttattccctggtttttcacacaaattgtttacaatttagaattattataaaaatagtgctttgtattgtgtatgcagagaattctatttgtagagaatcagaatttttttcatactaagagattattccgaggcaacaataaatgttatattaagagaaaatgtatttatggaaagatatcattagtgtttttattattacagtttttttccttaacccttaatgaataattgggtagatactttattctttatattaattgatggctcatggcttatttttggggttaataagggaagttttctcataggtatataattttagggttttcttttaaatcaacgtagtctttagtttaaaaagcatttgtaatgaagggaattatctgtcttaatttgtcttttaaatagctgatctgaatttttctgtgggccactagataaatatttcacagaaatagtttttatatcaaatttattaaaataagatatttatttatttattttttattctttaagttctagggtacatgtgcacaacgtgcaggtttgttacatatgtatgcacgcgccatgttgctgtgctgcacctattaactcgtcatttacattaggtatatctcctaatgctatccctccccccgcttcccaccccatgacaggccccagtgtgtgatgttccccttcctgtgtccatgtgttctcattgttcaattcccacctatgagtgagaacatgtggtgtttggtttttttgtccttgcgatagtttgcttgaaataagataaattttatctggcagagttttccccctaacgacatgagaatattagctttgaattttataacagttaattaagatttatgatgtgaaaattatttttttctgatgcttgtagcaagtactgtgaaattttcttaaaaaaaaaccgctgtgtggttcttttaaattaaatgagctataaagaaaatatgtttatattttctaaaagttcatatatattaaatgtttatatatattttcttatttttcctaactttatcaccttaaattatttaattaaaaaacttcaaatacgcttctttgagtcaagtaatgccgttgtttgatatcattgtgtcattgttttggtaaatcattattcaagtatgctggtgggggtggggagatactggcaatttcagatattcgggaattcagaaagattagtatcataagcataacatagcctttggagaatgtgtggaaggcaggagatagagaaacaaaagtgagcaaagtacgtaaaacttaaacacagataattgctgtaatgtactacaagaagtagaatttattccaagaatacaaagatttttgtacatcagaaaattaacagaacttttccaattagaaaaaaattttaaaccacattattatatgttgaaaaagtattttataaaatggtatagcaattaaaaacatcattaaggctgggtgtggtggctcatgcctgtaatcccggcattttgggaggccaaggtaggaggatcatgagatcagcacttcgagaccagcctggccaatatggtgaaaccctgtctctacaaaaaaaatttttttatggctgaataatattctgttgtgccacattttgttggtctgttcttcctttgatgggcatttgggttgtttgcatttttaatctgtgaataatgctgtagtgaacattggaatatgagtttctttgagttttttcatttcttttgggtatataggagtgggatttctgggtcatatggtaattttatgtttaactttttgatgaattaactgttttccacagtggctgcacacttaatattctttctgtcatggcataagggttccaatttctccacatccttgccaacagttgtgattttcttcctttttttaaaattatagtaggtgtgaagtggtatctcattgtggttttgacttgacttttccctaatgattagtgatattgaggatcttttcattaatgatcgttttatgtctttggagaaatgcctgttctagtcccttacctatttttgaattggattgcttgtgtttttgtcattcacttggaggagttatttatatgttctggatattaatctcttatcagatatgtgatttgcaaatgttttctcccataataggggttgtcttttcactccatggtcatgaggatttactcctatgttttcttctaagagttatggttttaactcttacatttaggttgttgatccatttggagtaagtatttgcatgtggtatgaaggaagggtccaaattcattcttttgcatgtggaaatctaatttccctagcactgttttttgaagagactattctttctctactgaatggacttgacacccttgcgttacttatagatttttagatttcattcatgttcctggttcataacagaaaggatgactaatcccttatcagtaaatgataaagataaatgatgaagatagtagatattttctaaattaaattttttattttttactaaaatgatacaaatgtatgggctgctataaatttacagttaactgatttttttaaagaactatttctttagtttcatttttaagtttttgttcactgttctgttgtataggattttagtttttatacagtgttttattaatcagctttaaattgatgcacatggaatacagggtcgtgtcctgagtgtcttctattcgaaatggttccccttaagcccaaacaaattctgaaacatttctttatctccaggtttccatggaaatcatgttacttttatactctccagtcactcctcagtggattcaaggttttctgttcagactagacatggaacgagtgtgatacaatttttttgttaacaaaacatctatttctagtgtaagaaaaacagttatgggtactaaacctcaaattggttagagattattttttaatgaaaaatgtttcttataatttatagagcgagtaattactagaacttgtgaacaatatgacagcagcagcagggcgcggtgactcactcctgtaatcccagcactttgggaggccagggcaagaggatctcttgtggccagagattggagaccagcctgggcaacatagtgagaacttgtctctaaaaaaaagaattaaaaaatagccagacatggtgacatgtagtcctagtgaggcaggagaatcacttgaccctgggagttgtttgaggttacagtgaactgctaatgcaccactgcactccagcctgggttacagagcaagaccctgtctatgaaaaaaaaagagcagttattttctaaattaaacgttttactttaaaataattgtagatttacctgcagttgtaaggaatagccaggcgccgtggctcatgcctgtaatcccagccctttgggaggctgatgtcggcgggtcaccgggaagtcggggttcaagaccaacctggccaacgtggagaaacccgtctctactaaaaatacaaaaattagctggcacacgcctgtaatcccagctcctcaggaggctgagagaggagaattgcttgaacctgagaggcagagattgcattgagctgagatctttccattgcattccagcctgggcgacagagtgagactctgtctcaaaaaaaaaaaataaataaataaataaaataaacaaaaaataaaacaaaaaaaggaataatatagagagatcttgtgtatatttgggttcccccagtggtaatctcttacaaaactgtatagtataatatcacaatcaggatattaacattgataacagttgagatactggacatttccatcaccacaaggattccttggtttgccttttaataacagtacccccttccctctcacacctgctcccttgttaacccctgataataactgctaatccatttgaaaaattttatcacttcaagaatgttatataaatgagttgtacagtatgtaaccttttgggattggctttttaaattttgcataattctcacaggactcatccaggttgtcgtgtatcaatatttgttgcttgttattgcatgtattccatggtatggttataccactgtttaaccattcaccctttgaaggacagctgaattgtttccaatttgtgctattttgaataaagttgtgaaaaatattagtgtacagggttttgtataaacataattttttatttctctagggcaaatgtccgggagtgcaattgccagctcatgttttaattgcatgttaatttataaaggaagtgccaactcttccattttacattcccaccagcaatgtataagtaattcagtttctcctcatccttaccagcatttggtcttgtcactatttttaatgttatttatttatttatttattatggggacagagtctcgctctgtcactcaggctggcatgcagtggcgtgatcatgactcactgcaacctctgcctcctgggttcaaacaattcttatgcctcagccgcctgagtacctgggattacagttgcatgccatcacccctggctaatttttgtattttttgtagagactgggtttcaccatgttgcccaggctgatctcaaactcctggcctcaagtgatcggccctctttggcctcccgaagtgctgggattacaggtgtgagatactgtgcctggctttatgttagctattttgataggtatatagaggtatctcattgtagttttttaaaataatttttatttatttgtataaatttattgagtataggtgtggttttgttacatacctagattgcttagtggtgaagtcagggcttttagaatatctatcacctgaataacatacattgtactcattgagtgattttcatttttgtaatggctcatcatgttaatcatcttttcatgtacttatttgctatttgcatgtctttggtgaaatatctcttcatgtcttttggctgtcttcaattggatgtatgtgtgtgtgtgtgttgggttttgagagttcgctatatattctagcctttgtcagatacatggtttgaaaatatattctcccagtctatagtttttgtttgtttgtttgtttgtttgtattttgagacagagtttcgctcttgttgccaggctggagtgcagtggcctgatctcagctcactgcaacctccccgtcccgggttcaagcgattctcctggctcagcctccccagtagctgggattacaggcatgtgccgccatgcctggctaattttttatattttcagtagagacggggtttcaccattttgaccaggctcgtcttgaactcctcacctcaggtgatccgcctgccttggcctcccaaagtgcttggattacaggtgtaagccactgtatagtttgtatttttaatcctcttaacagggctttttataaagcaaaagtttttaatattgatgaagtccaatttattgttttattctttttcttttttttcaagacagagtcttgctccattgcccagtctggagttcagtggtgtcatcatagctaactgcagtcttaaactcctgggctcaagaaatcctcctgcctcagcctcctgagtagctgggactgcaggcacacgccaccatgtctggctaatttaaaattttttttatagagacgaggtcttatgatgttgcccaggcagaagttttacttttattgatggtgtgtttaatttctgtcaacaaatatttattcattaatcattaagtactaagtatagtatgctggttgcttgatatttgagtctgggttaaattctgtgtaccccatgtacacaaaagtcagttcatctgtaaatacaaggtgttgttagaatcatgtgtgactgtttgtattagtccattttgtattgctataaaggaatacttgagactgagtaatataaagaaaagatgtttgtttatttggctcacagttctgcaggctgtgcaagaagcatagcactggcatctgcttggcttctgatgaggcctcaggaagcttttactcttaggggaaggtgaagcaggatcaagtgtgtcacatggcaagagtggaattgagagaggggtgtaggagctctttaaaacaaccagctcttacatgaacgaattaagtagaactccctcattaccatggggagggcaccaacccttcatgagctaccctcatgacccagatacctcttgaggccccatctccaacattgggggtcacatttcaacatgagatttggaggggacaaatatccaaaccatgtcactggaatttttttatccattgcatattgaacttagttaaaatttttattgcgctctgaataatgaatgctcataataaacgatgtatgtgcaatagtatgtaatgcaagtatttttatactagaaaaatatattttttcttccagggttctgtggtttgaatatgatgtgttcccaccagaagtcatgttgaggcatggtccccgatgtggtagtgttgggaggtagtacctttaagagatgagttaggtctttaaggtggattaatgtctttcttgtgagactgcattagcttttgtgagagctggttgttataaagcaggtcagcctcctttttcccctgtctctttcaaatgtgcctgcttgaccttctggtctctgccatgagttgaagcatcacgaggccctcaacagatgggccacctgatcttggacttcccagccttcacagctgtgagccaaaataaacctttcttctttataaattatccagtctcaagtattctgttatagcaacagaaaatggactaagacaaaattggtactgagagagtggagttgttgctataacaatacttgaaaatgtagaagcagcttgaaagtgaataatagattgtagagggaagaatttgcaggagcaggctagaaaaagcctgtattgccatgaacagagcgttaagggtaattctggtgaagacaccaagaaatccctaggactaggggaatctggaacttctttgagattacataagtggtcatgagcagaatattgatagaaatgtggacagtaaagaccattctgatgagatttcagaggtaaatgaggaatatcttgttgggtactggaataaaggctattcttgttagtagcaaagagcttggctgcaatgtgtccatgccctaggtctttatggaaggtggaatttaagaatgacaaactaggccgggcgcggtgggtcatacctgtaatcccagcactttgggagtctgaggcaggcagatcacgaggtcaggagttcaagatcagcctgggcaagatggtgaaaccccatctgtactaaaaatacaaaaaaagttagccgggtatggtggtgggcgcctgtaatcccagctacttgggaggctgaggcagagaattgcttaaacccaggaggcagaggatgcagtgagccgagatcatgccactgccctccagcctgggccacagagcgaaactccatctcaaaaaaaaaaaaaagaatgacaaactaggatttctggtggaagaaatctaagtagcaaagtgctcaagatgctgtgtagctacttctggccacttacagtgagctatgggagcaaagggatgatttaaagatataatttataattaaaagggaagcagagcataaacatttcaaaaattcccagcctggccatgtaaagaatgaaaaagaatgtttggaaagacaaaacaagagtgtgacctgatgaccagttactaaagagattagcatgaataaggagccaggtgctagtcatcaaattcatgggaaaatggtccccaaggtatttgagagaccttggaggctgtacctcccatcacaggcccagaggctgaggagggcagaatggctttaggagatgggctactacccaggacttcaggtgtctactccttgcatgccagtgtggtcctgcttggctgcaccagctgtgtggctcaagtggccccaggtgcagcttgactcacctctccaaaaggtacatgccatagattgtggcagcaacatgctgtggttcaagtgagcctagatgtggcttgtgccacagctccagaggacgcatgcagtaagcctggcagtgtctgtgtggtgctaattctgcaggtgtgcagaatgcaagaggtgtggaagagtgcttttcttcaagatttcaaagaatgttgtagaaagcccacaggcccaggcaaaaacttgccatggggtggagccaccacagaggttccctacaagggcaatgcctatgagggacttggaagtggggctgctgctgcagccactggcagcatgcaacactggcccaggaaagctgtaagcaccagtgtacaactctatcctgtgagaacagttatgtgggctgagcccagcaaagtcatgggagctgggttgcctgaggccttgggagctcacccctgcccaacagggggtattacctagagtgtccaggtgatggcacatagagcgaaagattattttgtgtgtgtatgtgtgtgtgtatgtgtgtatttttttaagacatgaggtctagctatgttgcccagactagactcgaactcctgggcccaaacaattcttgcacttcagcctcccacgtagctgagactacaggaatatgccattgtgcctgtccctggccgaaagattattctggagttgtaagattcaatgtctgctttgttcagtttgggacttgcttggggctgattactccttaatttttgcttctctcctttttggcgtgggaatatttacctgctgcctgtcccattactgtatctttgaagtagataacctgttttgatttcacaggcttacaggaggatgttagagttttgagtttgtgctgaaatgaaacatctttcaaggaagtatcaaaatgtggccttataacagaaaataaggattctgatttggtggcagaggatactgtgctataaaataaaatgtgactggagagtgaactaagtgctaagaactttgaaattgcatttgaaacaaatctgaactgactggttttgtttatattccacaaatttgtagcaattctgtaatagtgcttctcatcagatagacacatgtattcacactcatgtgttcatatctatttccattcatcctttttttattgttgttttaatattagggttttactaactttacaagatgaattgtgataatttctgtattttgtggtgcttctttatcatataaattatttattccttgaaagtttaatagaactgttaccagaaaggggtcccgatccagagcccaagagagggtttttggatcccgtgcaagaaataattcggggctagtccatagattagagtgaaagcgaatttattaagaaagtaaaggaataaagaatggctactccttagagcagccctgagggctgctggttgctcaattttatggttatttcttgattatatgctagacaaagggtggattatttatgcctctcctttttagaccatatagggtaacatcctgtcattgccatgacattcgtaaactgtcttggcactggtgggcatgtagcagtgaggatgcccagaggtcactctcattgccatcttggttttagtgggtttgggccggcatctttactgcaccctgttttgtcagcatggtctttacgacctgtatcttgtgctgatctcctatctcattctgtgattaagaatgccctaacttactgggaatgcagcccagtaggtctcggccttattttacccagcccctattcaagatggagtatacacacatttgcgtgtgttctgtatttcacagaggaaaaggacttttatgtgcattacctaatttaatctgtgtagcaaatatgtgagagactttataggtgagatattaaatgtattgcccaagattatacagctagtaggaatagaagccattgaattctcactgtatgtatattgctgtccctgaataaatgagacagttgagtggaattaagtctaaactgagacctggaaactgtcttttctttgaagtagtgactcagatgtaagagattttaagttgctaaggattataccagagcaacaagtagccaaaaatttggtggcttcttgtgctagagttgagaaatactttgagaaatttgtgtaagtttttgctctttgatttttttcttgtttttcatagaaacatattaaatatgtcagtttcctatatgttttattatttgaaaaatcaccctattagacattaaatgtaaactaaactaattaccattagtatttctccatggctttcctccttattaactgtgtgttaatacagttgatggtaatttttttttaagtatgctgtagaacattggtctcaatcattttaacctgcttatatgttcatacaatatttactgaaaatgttagggattccctactagagtggcacatgtgatgattagaagttggtgaatgaagtttcataatgtcttccggttgtggacgccttcttcatttttactatctttgggtagaatctttggagatgggtaagtagggagagagggttggaaggtagaatggaatgagaaatagtgaaggctattgaagaatttcagcaatgaggtgccaaatacagtctttaaataagagatcacggggcaggcatggtagctcacgcctgtaatcccagcactttgggaggctgaggtgggcggatcacatgaggccaggagtttaagacaagcctgggcgacgtggcgaaacttcatctctactaaaaataaaaaaattagctgagtgtggtggcacacatctgtaatcccagctacttgggaggctgaggcatgagaatcgcttgaacctgggaggttgaggctgcagtgagccgtgattgcaccactgcactccagcctgggtgacagagtgagaccctatctcaaaaataaaataaaataaaattaaattaaaataaaataaaataaaataaaataaaataaaataaaaaataaaatatcaacatgagttggttaggtacctatgtccttccatgattctgtaatatctgttgctggtgacctttgacttcgtatcctgtaaatctcccttttatttttgttcattcctttaagcaacattaacctcctcctactcgaggactcctatgcatgctgctccctatgcctagaatgttagttagctcccttacttcattgatatttctaatcagaaatcaccttctcggtgaagtctttccttgccaccagatctaagactctaaccccttcttcatgtcacctttttattttgtcctcccttttaaattttgtctctgtagcgattatcattattcatcttatatgtcttgcttttctgctttattatctgtctttcctactagagtacaagtttcatgtaagtccattctcttttacactgctgtatcctcagtacctgcccggcacatagcaagtacttagtaatatttgttttatgaatgaaaacattctttatgacattttaaggataactctggcatcagtgtatagaatagactgcagtgaggaaatactaattaagagacaatgaaaaggctcaagaagtgacagtaggaataaagagacagaggatacacaaggaagacatttttgaggtagactatataagatttgtttactagagtggctgggaagtgaaaagaatgggaagaaataatttgttctgaaatttctggttagagagactggcacactggtacattgcattgttccaggctcatattggatattcagtgatcatatattgaatgaataactattcagagataaaatgttaaacttttgcactaaattttgctttcaaatgtaatttatttagctctgtggtttatttccatactctgaatttctttgtaaattactcttattccaactttaggattatgcttccccaggacctcagaacaattttaaatgttacaagcctttttagcactgtactgcaatattttagcctaaagatttattccctgatcatctactttcataggttggtactttcaaagtttgctgcatccctccatgttggtaaagaaggaagacagaaagctatgtaaggcttatgcagtcagcacaagtcgttttgtgactaattctttcccatttaaaggaagttcattttcattctatttagtttcttcctatcctcaacttgtacaaggcacttgaaatttaaaatagtggtttcttagtactgattgaagtttccctggtaaaactactttcataaatgatcaattcacattttaacaacaatttttttaaagtattaagttaaacaatttaaactggtttagtttggatgctattgctgaagatcggttactgtaaaaatccaagtgtatatcagtatgccacttataattctacattcataaatttgagagtgcaacgaagaaaaagaaatattgagtaatagactgatttttgattctttaaaaaagggatttaaataatgagttaaatatatgattttgtccttaatacgctatttttcataggtatattttgatatagaacaatgtttgtgccaaattaaaatgataaattattttaatactgtcaaaattttcatctgaatatatttagatttttgttttcttagagaactttatttcaaagaaaaaaaacctcttgataacagatttgtgcttttgcaaatttatggtattagtctataccatctcatggtctccttatgataatatagttatgcttctgtttttttgagatatatgggaattttaatacaaacccatacatgtactcataatagtgaaaagttaatgatagaaccaagaaatgagtgcgatattaaagggagagcaaatgatagttttaaaattggtatgatacagcaatcatagactctttgtcctcaagggtctctagaatacatttctataaatgggaagcatctttcttacatattttattccttacgttaaagaaactcagtaaccaaaaatttgaccttaaaaacaagttccgcactcccccacctcattccattttcatagaattttttttctattctattctggttctatttgactccccagagaaaataggttaacttacttttttccagatttagagtgctctgacctagagtcatgattctttgagttgtcactaaaaatcttgccatcagaagtcccggttctttagaggagccccaaatggatctttaataccttaccgagatggaaaataagctggtcatgtctgtaaaccaagaatgaacaaggtagggtttgttttttcctttaatattaatttttaaatatttcacttgtgttatattgaaggaacaagtaacattgaaaatgttgtctttattattagaatgagacagaatgttttgcctgtataggggaagtaaaacttcacttctactctcagggtctccagctggacctgagaattaaattgacataagacagattaatagaggaaaagcatacagatttttacatgtatgcctccacagggaaatgatgacctagacatatatgtactaagttggacaaagagtagtaaattgtaaaaacataaaaagacacaggggcttgggctagggcagttaatcatggagaaatggctaggaagataagggcttgtcttacaaggttggttggttcagatttgcctcaactccccatctcgggtgataagaatatttcttttctccaggtacaggaaggacagcttttacattggagtttcatctccacttttcaggaagaaaaaggaaagtcagagtgcccttcttggatctgctggttttcaagtgcctttagttcaaaataatccttatgccaaagttacatgttttggggtagcatattctgccatctttcatatggtaactccatggctcaataactttctactgaaatgtcttttataaaactacttcatatgttctcaggccagtgttgttgttaaaagaaaaaaagggaaaaaggaaaacaattacttcatgtagtcagtaggatatatcagtgaaataatattgataaaaagatatatgataaagatataatactaattttatttatacaaaaaatggttttactattttacaggagcctatggtattgaagtatccttatgtatttgaagatttaaacttggaaaaaaatactttgttcatctcttcatacagttgattcagattcagcatacatttattaaatgtttattatgcaccatgttaagtactttaaccagagttatcctcatatattacacagcctacgttagcttgaaatgtgtataaaaatttgaaaattttgggattatttcctttttgttcactaaagattttatttttggactccatagttttgattaggaaagaacttggtaaataatatttataattattgtaaagctgcttagccagtagtctgtgccagaccaagagtgttacttggaacagaaatatctcttatccattttgtatccttggtctatagcataatgttttataatacatatttgttaaatggcataaattttctgagaaagtcataattattctggtcttatgttttgtgatttaaaaaaattagatataactagttttcaatcattttgaaataatttacaaaccctttagaacagtgctgttcagtacaactttctctgatgataggtatattttataaatctgtgttgtcttatactgtaatggaaagaacttatggctgcctccaattttggttcattaattcactccacagagattttttagtgcttactgtatatcagaaattgtgattcatgatggagatatttcctagtctcagggagctcaaagtctaataaaggagagagatttctaaaccaacagcaacaatatacttggaggataggctgggaggagaggagaatgcaagttgaattgtgaaggacaagttaatagtggtccaaatagagaaagcagcatttgctagtagatggagagaggagactatttggttcattccagtaactgcagtaattctttctatttctggtacctagggtgagtaagaaagttgctaaaaagaatggacagttaatcacagtaatcactcatcagttaatgacatgctttgtgtgccatgctaaagactttgcattatatccttaaagctgcaagtgagccactgcagggttttaaactggtaagtaaaaatcattttaacatctaagcttagtcctcttgaccccatatttattaaacttgaactttttagaggaaatatgaactttatgttaaaatttgaatttgattagatcccgtagagtctcctccctggtcagttttgttattgtggtagttaggatggttagaattactagagatacaatttaaaatactgagacattgaaggggatttatacattcatataactaagaattccagcagtagaacaattacaggtaaattaattctgaagctcaacagcatcaccaaagactcaatttctttctctctgccattttcagtgtattgtttattgttctcaggtttgtccttacatagctgcaagaggactgcagtaccttcaacttttacatccacacacagcattgttcatagactactagaacaactaatcccttcttgggtccctttttaagttaagggaaactttccagacagacaccccatgccaccccccaccccccgattcacctcacatccagttggccaggttatatcacttaacctttcttaagccaattaatgaaattgcaaatgttgttattgagattcatttactaatcaaagttcaacccctgagaaccagcctcccttgaagcaaatacctaaaataaagtcagcgttcttttagcatgaaataaaggattggataggcaactagtggagtctgccactttgtttttctaacctagttttgttttttttaatcttaaaaattagcagtctttctcataccaagagttagaaggacaagcccaaatttgcctaagataggaaagacaagaccaccttaagtttgttaataatccaaatattttgataagaagtttgcagaaatgaggagctgttgtagtataaattaatctttctgaggcttaccacttcgaagatcttaaatgacatggttcttgactgcaaagctgaggactgggccccaaactataggattttagtatcagaggcctgcctgggaaaccaaccagcagatcatcccagaagatagatttctatgattgttcttgaccaggggaattctcttctggaataggagtggatgggagatttgctcctatttaatttctttcctaaatgtataattttaatgacataaatcttttttgtacctgaaagaggtcaggtttttccaaactcaagtattagaaacatatttgtctacttttttgttgtcacctttcatcctaaccacagaaggcttggctggggaatgttctttgggagaaagagaatattgaagaaaaaatgatttttttcaaagtaaagcctggctatactatttgcttcaaaaatttacatcacacttcatgatcttagctctggtattattcatatactagtcactatagtcacttctttactcagaatattgtgttactttgctgttctactttgtttccattttaaaaaatggtcagaccattcagttttcctttctgttaagcttccagtggattcatgctctaaggatgaggtattattagatacttctttccttcctttctgtgttatttttccatccctgattatagggtgagcacttaatgtggaccaagtagagtattgggggacacagcttacttagaaataaaagagatagtctttgccagattatactgcctgtaataaataaaccagtattactaaaatatagtatgagaagtattgtgatgaaccttctacatggagtactaagggagttccaagggaaggactcaatctcagactggagggaaatggaacaattcttggaggaggtggtgactatcaccaagcctacatagcagttagccactttgagaaatggggaagaggatgtttcaggcacagagtacagcaagtgtaaagacgaagttgtgagaaaacttgacacattttgtgaactatatataggtagtttggtactgtggtggttcactcccatttcttatatctatttctttctgcatatctatttcattctcttgcaaccttgcacatttgttttagttcaaatagtagaacatagctaccaacaactgagttttgtatgttatagtccaggcacccagagaaggatactgattcagttcttttgttttcacatccataagctcatgggtaggtcaactccggtcttatttaggtctggtgtccaccctttgacaagtcagttacactttggactagggtgtggctgaggtttgtgatcatctcagcttgggttagctgcctatcccagtgcaaatcatctatggtagagggagggagtaaattagtatgggagtgagagtttttaaagggcacttcccagaaaggggcgtatgtgactctgagtaggcaaaatgacatgccatctgtaggagctattgcagcagcatccaggcaagagataatgagggtctgaactaagagcctggtggtggtatggagaaaagaatcgactgaactacatgattgattgggtgtaggtcaaatgaaggaagagccttagtcttactttttaatttacttaacaaaaatacttatcaagtgcttgctagagctactggagatacagcagtgctatatatcagatcactaaaagaacaacttgttctatactcacacattctgacaccagatgtgttccattaaacaattctccaactcttccaaaaccaactgagtatcctacaatttaattctgatgactaggagttagttagaccccacaggttgaggactagtcccacaagacgccccccacttagacactaattgccaagtctagacccttgtacttcttctgacctacaagctataatttctaggtgcccatggctccctccttgggttcagtaatttgtcagaacagctcacagaaatcaggaagacacttaacatttgccagtttattataaaggatattacagagaatctatatgaacagccagatgaagaagtacataggataagatctgagcatgggaactctgctcctgtggaattggggtgccccactctcctgacatgaggttcactgacccagcagctctgtcaaccccattgtttagagtttttatggaagcttcattatgtaggcatgattgatgaaatcattggccattggtgattgagctcaatctccagtccttttccgttccccagaagttggggtgggtggagctgaaagtttcccctgatttgatgattggttcctctggcagtcatcccccatcctgaagctattctggggctttcagccaccagtaatctcattaacatacaaaaagacactcttatctctcctggtagtaaaataccaaggctcttagtagctcttgtgtctattactgggtgactgagatcaaatattataataaaagatgcccttatcatcccaacactataagcgtttgaggaaactataagggttttagaagctctgtgtcaggaactgggggtgggaggcagaaccaaatagatgtttcctatgtcataatgatataactaaacttacattcaaggacaacaccatgtttataaaggaagtttctgggttaagtgactgggtgaatgatggtgctcttcatttgaggtttgggaggaaatgtaatgaattcattttatgaaatgtgaaatttgaggtgatgatgggttatccaggggatgttagatatttgggttatggacccacaggagaaggcagaggaagagagagagaattggaagtcatgaccatccagtggtaattgaagtttttaaaaactataaagtcgaatttacttttttattttggtgttcggttttatgaattttcacacatgtgtaaatgtgtgtagctaccaccacaattagcatacatcaccttacaggttacatcatgatattcgtttctggtcactctcttcccccgtccttcacctgggaaaccaatgagctatgaagatggttacactaaacaacagattttcaatgtagatgaaacagctttgtatgggaagaagatgccatctaggactttgttgctagagagaagtcagtgcctgggttccaagctttgaaggacaggctgactctcttgttaggggctaatgcagctggtgactttaaattgaagccagtactcgtttaccatttccagaattctagggtcctaaagaatgatgctaaatatactctacctgtgctctataaatggaacaataaagcctggatgacagcatgtctgtttatagcatggcttactaaatattttaggcccaccgttgagatctactgcacagtgctctgatggaaacattcaaggagattaatgttattctcatgcctgcgaacacaacatttattcttcagccatggatcaaggagtaaattttgacttttaagtcatattatttaagaaatacatttttcaaggctatagctgccatagatagtgattcctctgatggatctaggcaaagtgaatggaaattctggaaaggattcaccattctagatgccattaagaacatttatgattcatgggaggaggtcaaaatgtcaacattaacagaagtttggaagaagttgattccaaccctcatggatagctttgaagacttcattggaggaagtaactgtcgatgtgtgggaatggtaagagaactaggattcgaaatacagcctgaagatgcactgaattgcagtaatctcatgataaaacttgaatggatgagaagttacttacagatgtgcagagaaagtggtttcttgagatggaatctgtgtctggtgaagatgctgtgaacattgttgaaatgacagcaaataatttagaatatttcataaacctagttgataaaacagtgccagggtttgaaaggattgacttcaatttgaaagaaattctactgagtaaaatgccatcaaatatagtatcatttgctacagagaaatctttcatgaaaggaaaagttatttgatgtggcaaacttcatttgttgtcttattttaagaaattgtcacagccacaccaaccttcagaaactaccccccgatcagtcagcatccatcaacatagagaaagaccctccaccagcaaaaagatcccaacttgctgaaggctcagatgataacattttttagcaagagaatatttttaaatgaagttatatacatttctttttagatataatgctattacaaacataatacaaagttaatagattatagtgtatcataaacataacttttgtctgcactgggcaaacaagaaatttgtgtgactcgctttattgcgatcttcattttcttgcagtggtctggaacggaaccagcaaaatctctgaggtatgcctgtgtatgacctttgaagactgacttctttcacttggcataatgcctttgagattcatctgagttgttgtgtcaaaaagtactagcgagtgttcctttttattgctgaatggtatgccattgtatggatgtattgtttgctcatttattcacccactgaagaccatttggattatttccaattttaggtgattatgaatagagccactataaacattcatatatgggtttttgtgtgaacataagttttcgtatctgtagggctgatgcctaagaagtaggattgttggatcatgtggtagtatatgtttaactacacaaggaactgccaagcagttttccagagtagctgtacccttttcattcccaccagcaacatataagagttccaaatgctccacccacttggtagcacttgatattgtcaattgtaaaaaattttagctattctgtgtgtagtggtatttcattgtggttttaatttgcatttctctgatggctaatgaacgtcttttcatgtgcttgtcttccgtgtatcctgtgtggtgaagtgtcatcagatcttttgcccattttttatttggttgtttgttttctcattggtgtattttaagagttcattgtgtgctctgtgtacaagtcttctgttggatatgtgttttgcttgctttgtttattctcttaacagtgtttgataaagttcatttttctttttttaatggttcatgtttttgctatcatatttaaaaactctttggctaatcacaagtcataaagatttctcctgtgtttcttctgaaagttttatatttagatgtatgatttattgttttttatataaagtgtgaggttaaggttgatgtgtttgtttgtttttgtagggttgtgtaattgttctaacaccattgttgaaaagactacactttctcctttgaatagcttttgcactgttgttaaaaatcaattgactgtatttatttagatgtatttctgcactgtctgttctgttaactgatctctttgtattcttttgccagtactgcactgtcttgattactgtagctttagagtaagtcttaaaatagggtagtataattcctccaactttgttctttttcaaaattgtcgtagctattttagatcctttgcttttctatataaattttagaatcatcttgtctatctataaaaagatccttctgggatttggggtggaattacattaaatctatagatcaactgggatagaacattttttccatgtgggatcttcttttagtacatgaacatgttatgtctttccatttgtttagttcttccttgatatttttcatcagcatttggtagtttccagcatatagatcttgtacatgtttcattagacttacatgtaagttttttttttttttttttgagctagtggtacaatagtgccctcttgtccagaggggatacacaccacagcccccagtagattcctgaaactatggataacaccgaaccctatatgtacttatgtctttttttacacatacataggtacctatgataaagtttaatttataaattacgcatagtaagatattcacaacaataacaatagtaaaatagaacaattattataacaatatattatagcaaatataaatgtggtcttttctcgcaaaatatcttattgtactttattcatccttcttgatgtgatctgttgatctgataactaagatcactactaagcatatccaaacgactaacgggcatgtagggtatacagcatggatatgccagaagttactaacggcaggtacagtatacagcagtagatatgctggaagggatgatttacatcctgagcaggatggcttgagattttatcacactactcagtatggggtgtaatttaaaacttatgaattggtaatttctgggattttccatttaatattttctgaccgtagttaactgtgggtaactgaaaccatagaaagagaaatcacagataagggggtgggtggactcttgtttttaaaattttggtttcttattgtacattgcttatatttaaaacatatatatatataggctgggtgcggtggctcacccttgtaatctcagcactttaggaggctgaggcaggcggattacctgaggtcaggagttcaagaccagcctggccaacatggtaaaaccctgtctctacgaaaaatacaaaaattagccaggcatgctggcgggcacctgtaatcccagctactcgggagtctgaggcaggagaatcacttgaacctgggaggtggaggttgcagtgagccaagattgtgccactgtgttccagctgggcggcagaccgagactccatctcaaaaaataaaataaaacataagtatatgattttttttttactttgtatcctatgactttgctaaactaacttattagttctaatcgatgttttttgtttttgttttttagtagattcctttgaatcttttaagtggacaataatgtcttttgataatagggagagttttatttgttcctttccagtatgtatgctctttattctttttctcattttatggcactggccagcacttctagtacaatgatggctaagagtcgggggagtggtattcttgccttgtttcctgagcgttggctggggggaaacattgcttttcaccaataaatatgatgctagctgtagatattttatggatgttctttatcaagttgaagtagttcccctgtattcctagttttctagttttcttcaagtgctaattttttaaaaaaatactttttctctgatcaagtaataagatcatatgagttttcttctttgaaccgttagtatggtagattgcattgaatgattttcaaatactaaactagtctagcatttccaggataaaccccacctactcatagtttgttgttctttttctacattactgtattttattttctaatattttgttgaggatctttgtttctatgtacataaagggattttggtgtgtagttttctttttttggtaatgtctttatctggtttgacattcgagtaattccgtcctcataaaatgaattgggagtattttctgctcttctgttttctggaagaaattgtagaatttgttatttctttaaatgtttggtagaattcacctgtttagttatttgggcttggatatttctttttcataatttttttttaaactatagactttatgtaatagttatagcaatatacaggttactgtttaatcttgagtgagtttcagtagttattaagtgtttactaaaaaggtgtatttaaaagaccaggctgtgctatagaataactttatgaccttgggaaaggtactttagccttaacctctctgtccttaatttgttaatctgaaaaatcaaagttttagatttgtctttttaaaggtttcttccaattttttaattctagtggataagagtgtatgtgtttgaagtttatgtgaaaggactgtgaccctctgtttcttgttttatctgtcgtttattgagtgagcattgatttatttagattcactttgccttttatcagataagttccatatttcctcctaataaatgaattatttgttgatgaaaggtatgggaggaaggcctgtttatgcatttatacatgatatggtatgtaaaaaattactttcataagctatttatgtgagaaaattaagacatatcgtgttagtctttaatgttaaattttcttgaaaaaattatcagtttagaattttagaaatgttagaaatacatttctcttttggtgattgtccttctgaatcttcatgattaaaaaattcatttatttttggctacttaatagagacaatgtctatataagtattttttgcaaaatcatctggcatactcttgtgcattctgtccttttgttggattaaagcaaagtgaaagtagcatacagatttactgctgaaagaaacattaagttgcaggctgcagctggaggattttacgtaggcacctgtgggtttgagtgcgttcaatatacagactgcagtaggaggctggcactgactctgctgactccagtacactccttcactgctgttctgacaatttctccactgtccagaagacaaacaaaatggtgcagcacgtacagggcttgggaaaaagataaccgtcaatatgatccagaggtgagtttgctacagtgaacaggagagaaaattgttaacaagataaaagccttggatgtggttcagtatgtcagatgtcttcagctgttttaatatttgattctggccagtaaggatgaaactgttgtagttctaaaatcttcatgccctctatataaagaggttcaggtatattgcatttatagcattactagatgcatgcatggtagtttataaacatttatatttatactaaacatgtgtaatgtgtgtgtctatatagataggtgtttgtgaaggttatatctattaatactggatttttaaaaagtaagcacttttagtttttatattttctctgttgtacatttgttgcagctcctgccaatgtctctttccctatattgttcattttataatagcagaaaacattagtagcgcactctgtggtgagatatggaaaatcagtagaatgaaccttggagttggcacttcatattttattgatgactgtaatgcagtgtgagttcgcattgcacatagtcttgatttaaatgattacctcttttatgaaagcaaaatgtttgtaagaacggccatgttgtagacagggagcataaaataaaggagaggaagtaggacaagtaacatttctctgtccttggtttcttgaacaatgttcagcattgactcaaggcactgtcatttcagaagtacagtatagaaacaattgagcatcaagcatagatgaaacatggaggcttagtttcccaccccctccaaaagaagcactttacttatgtactcacatattttcggtttctgtggctgtgttactgggtagctgtccagttgagacgagatgtttacttaagccacacccagcagagtcagcttttaatgtgttgggggcactattttaatcctgtgctgatttgtaaccatcatctatgggatgcctttgagttgtaaaaagagggaaaatactagattcacaggttgcagcttactatgtttttgaatatttgagttgctgtattaatagcacagaagagcagtatttaagttatgcagcatttatctatggcagagagagatagagaatatgtgtatggttccattacaagtgtaatgcaagtattctgatcatatagctaaaaatgctgctggtatattattttagttagtgttgtgggtagtaaattggagtatgacattcagagttcagattttcttatttgagaaaatatttgtccaaacattttaaatacttaatttttctgtgcttttaaaagatttgcaaaggattcagcctgagcttagaaatgtataatgttttattccatgctaaagacattttgtatgtgataagaattaacaactgtatggctggctggctgccactgtgttggattaccttacccaccttactgtagacaaaaataataaggattcagcactaatcctagtagtctccatagtactcatattgtatattttcagaaactccttttttatagccaaagcaaagtgttctccccaaaaagaaaaaaaaattaaaaacaaatctctcatttgtactatatttctttgattttatcgaataacacaaaagagtaatgtgagattttttatgtcaagtttagtgacagtaactaactacagattgaaatatactatattattgaaatgtttcatggatctaaaatgttatataatcctgatggaatgttgcagatgaaacaaagaaatctgattggttcctcacaagatacagcagcctcgaaatccattctaactagaggcttctacagcagcctgggtggttagtatcacataaaaacaaaaatgcctcggagatgggaaggggtttggaagagaaaatgaagtcgctaaagcacttcagtaatcttaatcattgaacattttttttcagcttctctttttatttttattttttgctttgcttgttgttgcttaaagggagtgttatattcaatcgagttaatgaactttctaagtagtattctgtaatgaactagaagagtctctctaaaaagagttttatgttaactgatagactgggttaatgaataacataatttcagaacacttatgaaatatgaatgagtgggacttgttgggggaaggagatggatgagatggaaaagagctctgaagagcaggacactcatagtaactctttggtcccaccctttcccatcatattaaaattgcattagataatttgtcatctaagactttagtgatgcttggtgagggcacattgttattgacacgcaaacagcaggatgctgcaagtcagaacaggtggaaaattgtttgctgtctgctagctattagaaatacccttgagatgtgagaataatgtatgttagcttttacgtatttattattcttggctagatagtctgctggaatatagttgcaaattatagtaccaaatattcaacccttctgtgcgtttacagaaaatatttaaaatatgcctgtagtttattctactaaaatttgaaaattcttatatttaaatggtaataggtcaaattcagttataggatctgggggagggaaagttactgtgagcaggaatgagcatttacattaaaagaatgaataatattgaaaggaagtaaagcatcataaaataaagcatattaaagaaaatatatatagatatgtcctgataaaagtcaactatattttgtagtttctgttctgtgcttattttctaaattatccaatatgctaatagagtcaggctgaaggcagctggctgcaagtgttacaagctgaaaacaaaatggctggcaaggattactactgtaaatttgcaatagagagctggatgcatttaagatatcttttgttgaaagagtgttaaaaagtaagatgatgagggaatgactgttgtataagctgtttttgacaataaacattgtattaaaaaatactcgattacagcatgaaaacaaaaggctttacattcattttcaactaagcaataaaaaactcttgttagtatttatttagccatcattgtctttgtaattttaagacctaagtagtttctgagggtattgtttatgaatcgttcagattcacagtgtggttaagggtagaagaaattaacagtgaagaatttgttacattcttggaatggggaggtggaattgagagctaagtttctgggagttttatatattttttaatcttctagactagcctacattaaggatggaagacatagagtaactggaaaacttagagataaaaatgaaaatatagtttacaaagtaacaacatccatagatctgtattttatttttttctattgaagacctgttcataaaactatttgtattttagaaaagacttttctttgtataaccataacctatttcaattgatttttagcaattgttgaaagattacatgacatgaaaattgttgataggcttggttagattgagaaatagcttcagcaattaattagttaagtagattgaagacagcacatacattcacgtatcttgtctctcacattgtaaagtctatgtactttaagagggcaaaagtgtaaatatgttattgccacttctctagcacatagtataatgccccatcacttaatgggttctcagtaattgatgtacagataataatcacaaacatgtttgattagtattcacacacacatatacgcatataaacccatacataattataaacccatatacatacatatataaacccatacataatgatgctgatttaattttcacaaccttgtggaataaattctatcattttactcatttaacagatgaaaaaactgaggcagagagcaagaagttaagtgacttgaccaaagtcatatagtaaatggtggagtcgggacttgtactcatgtactttgaactctttcatcatcttttcctctagtaattgaagattaagctgtattagcattcaacagtatctttagccctcagaagcatacattatatgtatattctggcagaaactgcaaagcagagaaaacttttctgctacatctttcaaaattgctttaactgatgttttgttttctaaaatcccttttcaatcatttagatgtagctgatggccattatcatcatcagctaatgcagatgtacagttctgaaagcaatttaaaagcccatagcaggtatatacaggaagcagttggaaaaatatattaagttttctgtactccccaaaatggctgccaacatctatcagtcatcaagcccagttgattaaaacttctgtgtatttctgaactttgtcttctctttacttcttcattctcatttcttcagaatctcatgtcacttaaattattgtgtctccaatctcagtaccctttagttcattctctattttgcgttaagaatgaattttcttaaatgttcatctgatttttctaatatgtgcattccattagttctccaaataaaacatggcttggttttttactggttctctttgctgtaactgtatcctaacacagatgcacacagatatagataatatatagaccagacagatttagaatttgattttaaaagattaatgtttgaatctcctttatcagagatgaagattatcagtataaatgtatccatgaacgatttttgtttagtattgtgtgttttaaaatataataggtggtatcatttcctctatgtcattctgcaacttgcttttttgctcttgttagaaacttagtttgtttcttttatgtattgtacagtatgtttcttttatgtattgtatagtattctattttatgagcccatttcttccatccatttccctcctaatatgaatttgaattttctggtcttttttgtgtgtgtgatcataaataatgttccagtgaatatccttacccacacattagtttttctaggaactatacctagaaatggacttgcaaatgtaggttatttgcattatcacttttactacatgatttcattactttgtcactttaccaatttatattcttagaagtgtctgagagttttttctttttcctatccagtagtcatatggtcagatttcttcctttttctcagtctggtaggagaaaggtaatgtcctagtgatttaatttgtttccttaatttatagtgaggttgaacatcttttcatatgttttataggcctttagagttcctcatttgttaataacctctttatatcctttatgcatttttctgttggattatttgtctttttcttattgatttataggaattctttatggattctgggcaggttcagcaaactgtagcccatgggccaaatccagcctgtgtggcctgtgagctaaggatggttttcccatttattttccaatcattccgaaaaaaaattaaaggagaataaaatgttgcaacctatcaacattacaaaaaattcaaatctcagtgttcttgaatagttttagtgagatacagacgcactcatttatttacatattgtctgtgcctgcttttgcaccacaatggcagagttgagtagtcgtgacagggagcatatgctctgcaaagcctaaaatatttactttctttatagaaaaagtttgcagacccatgttttagattgatccttagcctgtgacatttataacaggtatcttctgtcagtctgtacactgtcttaaaacgttccctttggttttaggacggaaactccaaacttctgttaaatagaagtttaaaatttcaatttattcaaatctatcattcttttttatactacgtgttatttcaggaatctttctttactcagagactacaaatatattcttctatatttgaaatagttttgaagttttgtttttcacttcgatatttttaatacatttggatttttttccttttttcttattgttttggtaaggggattatggtatgagaaaagggtctaatctttttttctcatgtggagaaagccaattttccccaccatatttgttgttgaatacccttttcttacatccagtgatttatcatcccagctttctcatgtactaagaatctgttatatttgcatatgagtcttttctgggttcttttattcagttctttccatattctttttatttaaaaaaattatttttaaaaagtagagatgggtgtctcactatattgcctaggctggtcttgaactcctgggctcaagtgatcttcccacattagccttccaagtagctgggactgtaggcacacaccatcatgcctggcttctctctttattctttgattaaatatttctatattctatttggtcataatgattctcattatccaactacttaatcattgtattcacttttcctagttccttgggagaaaaatacaaaatgtaacactcaagaactttactaatgataagtttagggaaaggaatattgttgttaaattttgtatattgcatatacaaaggtcatactgttatctttattaaattctttttttttttgagacagagtctcactctgttgcccaggctggagtgcagtggtgcgatctcggctcactgcaacctccgcctcctgggtttaagcgattctcctgcctcagccttctaagtagctgggactacaggtgcgtgccaccacacccagctcttttttttttttttttttttttttgagatggagtttcactcttgttgcccaggctggagtgcagtggcgccatctcggtcactgcatcctccacctcccggattcaagtgattctcctgctgcagcctcccgagtagctgagattacaggcgcccaccacaatgcttggctaatttttgtatttttagtagagacagggtttcaccgtgttggccaggctggtctcgaacttctgacctcaggtgatccacctgccttggcctcccaaagtgctgggagccaccacacccggcctttaataaattctttaacatattttaatctcaaatttctagtttcattgccattattattataatcaagtaatatagtacagattaagtacccacaagtgcatggtattatgctaagtactttaaaaaacatttatgcataaccagtaaagacaaaatattatttaggcataatgggatgaataaagtataatttatttgaaaaaacaaatttgaggaatatttacataatatatgattatttgactttgtattactttgattttccagtgagtgtctatatatttgaatttacttatcagtcaaaacagaaagaggttgtgtttttttcttggaagtgaaatggagagggggagatctgatttttagtctatcagtagctgtctctctatatagggagtaagaggtttcttgtgaaccatgtgacataaaaatagcctattactaatatcttttgaaatttttatatcttcatatacgaaggcagggattttaggtgaaaactgttttatccccactccttaggtatacagtagttgtttttcaggtgtctgctttagacatctgaaggtagagatcagaaactgaaagaaagccaatattagaaaaacaaaagtagatccaattagaaatgaagctggaaaagtagaaccttatagatcgtgttcaattttatatcttctgacgggagaacatttaaacattctaagtataaagtgaggtaactgttagatttgcatttctaaatgattactcagttatttgtggatatatgttgagaagagaatggatataggagtggatgcaggttggagatggagacaagtggatggattcaagagacatttaggagagaaaatcagtaatatttgatgatgaattcattgagatggggagctctgttggagagtatcaggtttgaagggatgaaaggaagtttagaatttcatgtttcgatactttgagtttgaggtatatttgagacatccaagtgggtatttcaaaaaggcagttgttatatagacagacttttccaatttatatacaaataaatgaataggggctccctagtagaataatggatttaaaagtatgtagaggaagaaaaatatcttttcttcattcatcactaggttcatgacggagacccctaaaacaaaagacagatttgttaacaataaaaaaagcatacaaatttacttaatgaattttatgtggcaactgaagccttcataaggaaatgaagacctgaagaaacgggtaaatctgtgtatttttaatgttagatttgatgaataagtggatagctgtgaagaagtgtgattggataaaaaagtggaattttatggtagtaaactggggttggggtgtgggagtccttagcaagactttttatcaggattcttttctgtatccctctgtcttcagagataaaggcgtttctttaccccaggtataggtaggacacctcttgaatgagggtcttatgacctgctttaggagaagattaaaaaatcctttctaggttttaggagtctgctttaggaagaagtgtgaggggaggatgagagtgatctttctgcttctgttctgttaaatgccaaggtaccatattttgaggtatcatgtcctgaactccatcaagtaaaacataaatatttgggttgagtattgagaattattgcagaactccagtttgagaacaccttatttgttttttggaaaaacaaaaagggttagacaatttcacttctgactgttcatgtttccctccatctagctctagacctggaattaatgaggtgctaagtagggtagttatacatttaagtctttaatccatcttgatttgatttttgtatatggtgtaaggaagggatccagtttcagtcttcttcatacggctagccagttatcccagtaccatttgttgaatagggagtcctttcaccattgcttgtttttgtaagctttgttgaagatcagatggttgtatgtgtgcggccttatttctgggctctatattttgctccgttggagctggaggccattatcctcagcaaactgatgcaggaacagaaaaccaagtactacatgttctctcttataaatgggaaataaatgatgagtacacatggagacaaagaggggaacaacagacagacactagggcctacttgagggtgaagggtgggaggagggagaggatcagaaaaaataactattgagtactagccttggttcctgcatgatgaaataatctgtacaggaaacccctgtgatacaagtttacctgtgtagcaaacctcacaggtacatctaaacctaaaataaaagataaggagagtaagtcagattttaaatttagcccttagtaaaacggaatattatttctccttcccaaccctccatcttctgttctcttaatggtattataatcaagcaagtgaaattcccaaattcccaaagaattctgaggcatccagaattcccttctttctcttgttttacttatgcaaattaattaattcaacagctattttttgagtaccttctatgtgtcagatactattctaggcatggctaataaagcattgaatataaaattatttgtcctcatggaatttatattctagtgggtgaagatgaccagaattaagatgaataggtaaaacatagaatatattagtgataagtactaggtagaaaaataaagcaaggaagaagtaaaaaatgtgtatctgtgtgaatatggtggtggtggggtaccattttagagtgatgagggaaggcatgattggggggacagttatgtatctacccaaaggagatgcaggacaagccatgcggacatctgggagagaagtatttcaggcagaggccttgatatgagtatattcttagagtgtttaaagtacaatgaggagagccagcatgcttcagaaaagtcagagagcaagagtggtaggagatgaggtcagagaggtaataggggccaggtaatgtagagctttgatctaaagactttgacttttacttacaatgagaaacctttggagggttttgaggagaagagtttaatgatctattttgtgttttaacagaaccattctggttgcagtattgagaatagattgaagctgggctgggatggaagcagagaaaccaggttagtcatgagggtggctgggactcagggtggtggtagcagagggtgagaagtagtttgggtatatcatgaatagctgacagcatttactgttggattgtatgtgcagtgggagagaaaaagaggacttaaggatgactccacggtttttggcttatacaaccaaaagaaaggagttgctgtttacagagatgaggaagactgtgagaggagcaggttcctggaggactattaggacatgttaaattttgagatacctgtgtgatataaaagtggaaatgaggctgggcacagtggctcacacatgtaatcctagcacttggggaggctgagttgtgtggaccacttcagcccaggagtttgagaccagcctgtgtaacataacaagaccccatcttaaaggggccttaagcataacctccaaaataaaaattagccaggcctggtggtgcacgcctactcaggaggctgaggtggatagatctcttgagcctggaaaattgaggcttcagtgagccgtgatcatgccccagcacttcagcctgggcaacagagcaagaccctgtttcaagaaaaaaaaaaaaaaaagaaagaaagtggaaatatagggtaggcaactccataaatatgaacttcatggatgaggtccaggttagagatataaatttgggaaccatcagcatgataaaacataaaaccatgagtctatttgagctaaccaatggaatatatatggcaaataatacagattaaaaagtgagccctggggcagtctatcatgtagagactggggagatgagaaacaataagccaaggagacagaaggagccctagagacaggagcaaaaccaggcaagtgtgacatcttggatatcaagtgaagagaagacttcaagaaagaaacattaactgcatcaaatgttgataaatcaaaaaataaaactgagaactgactgttggacttaacaatggactttataagagattttggtaattgtggattatctggaatgatagggacaaaagtcttatgggagtggatttaaggaagaaaggaaaaataaattgatggcagcgattaaaatgactctttcaaatgagtacagtctttgcaattctgtgtcctaaatatttcacaagcctacccttttcttcatagtctcaatgttagtgcatttatttaggctttcctttcctctgagcttatggcagtgatctctttacttttaggccatggtccacaccattgacttaaatatatagttgccaaggttatcttttgaaaacacctgtcagatcatgccactcctttgcataatgcccatcattttcttccctacatttatagcataaagttcaaattgatcatcatgaataatatttatgccttttgtgattatgctttttatgattatgcctcagcctacttttctagtttcatatcctgcttcttacccatactttctgtgttctagttacattgaactctttagatttctctaagtgaccttttctttcatttgtgtctttgcaaataaaatctggtactgttcctgaaaaccctagctcatacttgagaagctgtggcttccctgaggtgtaggttaatatgaagaaggcagaggctgttctagcttttagagtcttaggaaaatgatttatttagttaatttgtttatttatctctggtattatctgttgaaactgtatgttgagggggatacatgtggatctcacttttggctgcatatagactgatccaggaatccatggatcagtcaaatattcataaattaaactttattatagctatgtatgtataaatggttcctgacttaggatggttgaatttaaatgatcttccaactatgattgtgtgaaagtgatgcatgtatagtagaaactgtactttgagtacccatacaaccatattctttcactctcagtacagtctttagtgaattacatgaaacagtcaacactttattagaagatagtgttatagttttaaaaaatttgtgttaggtgattttgcccaactgtaggctaatgtcagtattatgagtacatttaaggtagagtaggttaagctatatgttctgtaggttagttgtattatatgtattttcagcttatgatatcttctacttacaatgggtttatcaagacataaccctgtcgtaaggtgaggaaaaaacatagtgcacatcctgcagataaggcgggactgttgtatgaataacgtgctgaagaagcacagaagagagaagttctttctggtaggcatccagaaagtctatgtaggaagaggaatgacatctttcagtaaaaggaacttgttgttgatcatgaatatgatagatgaagattccatttgtttagtatgtgcttactttgtgccagatgtcgtcgtatattttgtgaatgttactacatttgtttctcacaaccacatagagcattatgataacaatttcacagataaggaaactaagatacagataattaattttcctaaagtcatataaattgtaatagttcaaagattgagtccagctcaactctgctagacacccagcacgtacatattggctataatttcattatacagtcaagtggagggagctacattttatgcagaggagagagcataaattgatagcggccttataatatgtttgctttttgaatgtcattgagtagtttggtgctaccatagtataggggagtatattatttaggatttttatggttgcaagtaacagaaaatttgaatcagaatagcttgatataaggggttagcaaactttttctgtaaagtaccaggtagtaagtgttaacttatatcctatggtttattccctcttggtttataagatagcagccagcatattcaggggctccattgatcttttcccatgtttagggagatacataatcttttccagaatttctttctaatcacttgaacttaatcccatctttgttacaactactgaactctgccattgcaacacaaatacagtaaataatttatttgctgttatgactgtgtactaataaaactttatttgtgaacactaaaacttgaatttcaaatattttttgagtcacaaaatattgttttagttatttgcagtcatttaaaaatgtataaactattctgagctctccggctgtgcaaaaataggtggcaggccagatttggctcgcaagagtgtgctgacctctggtttttatgatgaagataatttattagattgtataactctagtccagagatagggtagttttcttcagtaattcagtgtcaacaacatccttgttatgttccatctcttcatataatctttgaaagtgttaatttatatctcatggtttattcccttctgtgtttacaagatggcagccagcatatccagggacctaccgtctttgtccatgtctagtgagagataaaaccttttccggaagttctttctaatctctattgaacttaatcccatcgggtttcacccctgccactccacagagagagaccatgctaaaccatttacactggctgaatgcagtgatcaattctcaatcttcatattacttgacctatcaatatttaatatttgatcttttccactccataaaaccccttctttgtttctatactctccttgtcttgttcctattctcacagtattctccccaggctttcagcctctacatgttcgattccacaccaagtcttagtcctctgacctcttttctctctttttgtgtctcattcttgtatatactctttccttggggatctcatgcagtttcatagtttaaatgggatttatttactaatgatttgtgtgccgatggcatatctatatttctatgcctatttgtctaataagcatttgaaacttagtatttccaaaactgaactccgcatagtctcctcatccccaaatcagttcttttgcagtctttcctgtcttagtaagttgcaagtccattttttaggcccaacatattagaattgtcctcaatttctttatcttactcttctgacagcagattctctttgccatatcttcagaatatatccagaatccaacctcttctcactacctccactaaccacttagtccaagtgttcattcttattctgaatttttgcagtagcctcttaattggtctctctgctttgtctacttctgctctcttccccttcagcagtagagagccttgaaaaagaacacagttttaaagccagacaattttgattttagtattgctacttactagtggtgtgatattgggaaagtcactttacatctctgaatctgtcttacatttaaaatggtagtactacttgtttcattgaattattattagtactaaatgagataatgttataaagattttactagtactatatccagcagaaatgcctaaaccaagtctagctccttttctcttttctaccccaaatagaagagctgctcttcatttcttctgtttatcagagtgcttatgtagccatggaatattttaagcatatactttttcatacgtagcctttggctcataaatgttgtttttgtttttttcttttgagatggagtctcgctctgttgccaggctggagtatagtggcgcgatctcggctcactgcaacctctgactccctggttcaagcaattctcttgcctcagcctcccgagtagctgagattacaggcatgtgccaccatgcccagctaatttttgtattttttttttttttttagtagaaatggagttttaccatgttggccaggatggtctcaatctcctgaccttttgatcccccagccttggcctcccaaagtgctgggattacaggcgtgagccaccgtgcccggccataagtggtctttagtttatgttcctgctccttccttttgtattttctttatatttcattcatgtcctctaactcatgtgtgctcttattggcattaagtgtatccagttcttgcagatttgtatctgattagtaaaagggaccagagttcatacctgaatagtaaaactttaatctatatgtatccattgtattccttgtggttttaataacctccacccctcctattagggttctgtattttagtttctagagtattgaagacaacctccttcaacattttaattcataaaacctagtattctagcagatcatttagctgagaacactaaagatgagcttcggctagattaagttatttttcaaccgtcatgttttgatcctggattgagaggaatagtcacccagttgcaggaaataacacatttttcttggacttatttattcactttcttattagactttctctaacttaaattccttcataggaaatcattatatatggaatattcctacataaatgacatttctttactaggactatgttggtgcctaaatatagctgagtttaaagctgtctactctgtgaggtaaattctaatgacattttcccttttgaaataatgggaagagaacaatctattaacagtatttctcagtattgaaataatattgttttatattatttataaataattgctggatttaacagtatgctgattaaaaaaacagcagtattctctgatgtttatctgaaatctaggaaaccccaattgagatgggcagctagatcttttttttatttctgcacttcttacatcagtgggttgtcctttgtaaagtttatgatatatttgaagtaagtctttaacttaagtttgatgtgagtaagttctatcatcatgtacatacataactctattctatttcctgtactctggggtaatcagtattatgcaaacatcttcactttttttttttttttgacaactgaaggccttctgttttgtccataaatatagatgcaaatattatgtgaaggaggccttatctgtaatgaaggaatagtgttaaacaagcaaaaactttaaagtactgtgtatcattgcagtcttgcttttttgagtaatggattcctagattctatgaggataccacaaccacttttaaagaggtttctaaggccaggtgcagtgcttacgcctgggagaccaaggtgggaggatcacttgagctcaggagtttgagaccaacttgtacaacgtagtgagacctcatctctaccaaaaaaaaaaaaaaaaaaaaaaaaaatatatatatatatatatatatatatatatatatgccaggggtggtggctcccacctacagtcccaggaacttgggaggctgaggtaggaggatcacatgagcccacccaggaggtcgaggttatagtaagccatgattgtgtccatgcactccagcctgagtgacagagtgagactctgtgttaaaaaaaaaaaaaaaaagtttctacaccatcttggggcagtggtgattttaattattttttttaaaaatctgtatttacttctacctgagagctaatgacgacttttatgattagtttccactggggtaagatgtaattaaagtttcagtcttagagaatttttcaaacttactgaaattttactgtaatgtatttctgattcattttttaaaattaaggatgctgggtgtggtgactcacacctgtaatcccagcactttgggaggccaaggcaggaggatggcttgagcccagaagtttgagaccagtcctggaaatgtagcaagatccgttctctaccaaaaaaatttttaattagctagacaaggtagtgtgcacctgtagtcccagctactccagaggtttaggagggaggatcacttgagcccaggaggtggaggttgcagtgagttgagatcatgccactgtactccagcctgggtgacagagcgaaaccctgtctcataaataaaaaaggcaattaaaacattttagattatgattgtgtcaaaattggtgactttttttgtcttaacatcattggtttgctgacttgaaactatttcttaagccatttcttatctgtatttctcctgtggattgttttgttgaaactctggcattctgcagattgcataaatttaaaattattggaagatttgttttgtatttattttttcccttttattgtttaggagaacagtcctggtgaggggaaatgtctatgttttattgatgttacttctgacataattcaaaggcaaggatttttttgtttttttttttaagagacaaggtctcactgtgctcactatgttgcccaggctggcctccaactcctggtctgaagtgatcctccagcctcagcatcttgagtagctgggactacaggtacatgccatcatgtccagttgagggcatgttttgatgttaaaacagagaatgcaatgcatatatgccattttatccacatagaaaaataagaaaaatgaaaatttatgacatacctgcataggagtgttgtttattataattgactcccaagtaaaagagaagaagtatacttaaattaaatgatcacaaggaaggaaaattgacttaagactgtatttacacatcctgatacctctgatataagatgccatagatttctgttttgttaaagtgaatctttattctacaataatttaggactttataatttttttctttttataaaaacttttattttaggtctaggtttacacgtgcaggttgatttataggtgaatttgtgtcatgggggtgtgttttacagattatttcatcacccaggaactaggccttgtagctaatagatatattttttttcgatcctctctctgctctctcccttcacccttaagtaggccccagtgtctgttgtttccctctttgtttccatgtgttctcatcatttagctcccacttatgagtgagaatgtgtggtatttggttttctgttcctgtgttagtttgctaagaataatggcctctagctccatccatgttcttgcaaaggacataatcttgttcttttttatggctgcatagtattccatggtatagaagtaccacattttcgttacccagtctgccattgatgggcatttagattgattccatgtctttgttattgtgaacagtgctgtaatgaacatacatgtgtatgtgtccttatggtagaacagttttgtattcttttgggtatatacccagtagtggaattgctgggttgaatagtaattctgtttttagttctttgaggaattgccacactgctttccacaataagtgaactgaatacactcccaccaacagtgtataagcattaccttttctccgcaatttgccagtatctatcatttttttacttttttagtaataggcattctgactgtgtgagatggtatctcattgtggttttgatttgcatttctctaatgatgtgatattgagcttttttttccaaaagcttgttggccacatgggtatgttttcttttgtaaaatgtctattcatgtcctttgcccactttttaatggggttgtttggttttttaagtttcttatacatgccggattattagacttttgtcagatgcatagtttgcaaaaattctctcccattatttagattgtctatttactctgttgatagtttcgtttgctgtccagaagctcttttgtttaattagatctcatttatcaatttttgcttttgtggcagttgcttttggtgtctttgccatgacatctttgccagttcctatgtccagaatgggattacctaggttgtcttctagggtttttatagttgcgggttttacatttgagtctttactcaatcttgaattgatttttgtatatggtgtaaggaaggggtccagtttcagtcttctgcatatggctagccacttatctcagcaccaattattgaataggacgtcctttccccattgtttgtttttgtcagctttgttgaacgtcagatggttgtagatgtgtggccttatttctgggttctctattctcatctattggtctatgtgtctgtttttgtatcagtttttgttactgtttttgcatgctgttttgattactgtagccctgtagtatagtttgaagtcaggtaatatgatgcctccatctttgatatttttgcttaggatttgccttggctatttgggctctttttgggtttcatatcaatttttaaatagtttttttccagttctgtgaagaatgtcattggtagtttgataggaatagcattgaacctgtaaattgctttgggcagtatagccattttaatgatattgattcttctgatccatgagcccggggtgtttttcctttgtttgtatcatctctttgatttctttgggaattaatttttttatgttttttttaaaatctgttaagagatctgggtcattggacctgtagaatttccttcagtctgaattatgttgtttgtgtactcagacacaacttaacattttccctttgcttttcttgaaaatcagtagctggattttgttgaatatgcactcaggaacaattaaacattttcttctgtactttgtttttcctgaaaattgacagctatattcagaagtttgaccagattcaggtttggtagctttggcaaagctgtagttgtgttcctatcatcacttgtttttactctcttttgatgtttttaggcactgagccccagtgcctatacagctattaattcattgcaagttgcagaatggtgatattctaattccatcttttgtgtcccacttattatccaaaataatttttagggagattcctcttatgtatcctttggctattagtaatataggtaaggcagcatcaaagcttgatttttttttttcattttcccagttttcaagataattggtttcttgtcaacctcagaatgtggccagttagtgttttgttttgtttttttgttttctttaaacattttatgatctcctggccagtgagaccctcttcactaacctttttgacatgaccataattgagaatagtcttgatagtttccttactattggggatgtcagatgttccaggttcatttagtacatttccttttcagaccagctagttctttaagaagtccgggtttcttttaatggagaatggcatttcaagatcacaacctgggcactagacatgtccactgctactggatcagtctgtttctaggcgttttcagtggatagagttaggatatacctgtgatttataagattgtattgatgtttccaatatagattcagtattacagaatttttactgtacttctgtactaccttcatagctcctttcttccacactgagaaatctggttcgtaagggaagatagaaatagtgtgtcccataattactcgcttgctttatccctccttatatagagagtggtctgagaatattaccaccaccaattattgaaatcagttaatttttgttgttgttcatgctgtctctattcttccccattcacttatggttgtactgtacatgtattgtcagatcatgtagtgattacatactacaatctctctctttaaaagtcctcgtttgggctgggcgtggtggcccacgcctgtaatcccagcactttgggaggctgaggcaggcagatcacctgaggtcaggagttcgagaccaacctggccaacatggtgaaaccccgtctataccagaaatacaaaaattagctgggcatggtggtgggcgcctgtaatcccagctactcaggaggctgaggcaggagaatcacttgcaccaggaggcagaggttgcagtatgctgagatcgcaccactgcactccaacctgggagataagagcgaaactctgtctcaaaaaaaaaacaagtcctcatttaatcttaattctggaaacaactgcatatttaatctcaccactagtgcttattttgatatctttctagttattttgttggcttaaagttctttttctaatggaactaggaagaactaataacagtattcactgagtttttacatgttgatagcagtttgtctttaccccttatacttaaaggtaagttttactgaatgtaaaatctttagctcagattctttgtgtattttaaatatctttttccattttattctgtttctttttctttataaatcatgttttggaaatgaggtttgatgtgtgcctacagtcccagctacttgggaggtggaggcaggaggtggaggctctttttgagcccaggagtttgagaccagggtgggcagtgtagcaagaccctgtctcaaaataaacaaatttaattaaaattttaaagattatggccaggcacggtggctcatgcctgtaatcccagcactttgggaggccgaggtgggcggatcacctgaggtcaggagttcgagaccagcctgaccaacatggtgaaacctcgtctctactaaaaatacaaaaattagccgggcgtggtggctggcacctgtaatcccagttactggggagggtgaggcaggagagttgcttgaatccaggaggtggaagttgcagtgagccgagatcacgccattgctctccagcctgggtgacaagagcgaaactctgtctcaaagaacaaaaaaacaaaaaacaaacaaaaagattacatgatagttttgcttaaatactcaaatgatccccccctttttaaatccagtaattttagtagaatttagtgcattgatctaagttgataatgtcaagtatacagggtactcttgaaatacatagtttcaagtatgtgtgtgtgtgtgtttatccttccatgtatatatgtctatgtatgcatatatgcatattaacataaatacatatataactagatgtatatatacatatataaaacatacatatacatgcagggtttttttttctgaaaagggatcttgaattacagtttttctgttctctctggttttctttagagattcctatttatccttatgctggaccatctttgcctgtcttcagtatttgtcactttcctgcaaatcctttttaatccctttcttctctttatttgttaaaaactttcctccctttaaccttctctttctcttaagatcattttgtttatttgatcttgcgtttcttctagtttagtcttcattactgaaatgaattttatttataattcttttctgatttctgtctcttcatttctgagtttttctgattctgatttgtattgctctttgatgtgttatctaattttcttaacatttttagaactttttgaaattgcacattacagttttgaattgtatattacagctttaattttttttaataagcctttttggtgtagtttcattggaggtattacgatgctttttattctctttctttcctttcctgtctttgggatttgaccctgatgctttcttgttgatcatttttgtttaaaattagtttacccaagtatgtataaggagacatgtcatgatagctttttctaactccacatagctttctcttttgttgtttttttgtgaagtgttacattgcagcttgccttctagcactgttctcctcttgtactttgatttagactttctcttttctttgtcccttttgtccattttctgctgaattttcattccacttctaggactttctttttagcatggagccgtagcttggcacatcagtttcaagagtacacatggctaaactggtccagcctcttctgaactttctactgcaggccccatgtactcatttgttcttagagtgggcaaacacctttcattgtcagctggtgttatcaaattaattctttgtattttccggtgagttgcattctagtgattgccagtttcgtggtctgtcatacaccctattgctccccagccccctcctccccattttgtctcatttagatgctcattaagtttcaggtctatagctgttttgtttgttcttagcaatacccatttatattttagggtttgcaaggataccttttgtacaaaggaaaatccaacagtattcttctactatactcttcatacagagcacttctgtgaccagatgtgtgggggcattttttccccaccacgcaattcttcaattctctgaagacaccaatcaggtgtcctataattcaattcaattctggctacttagagtttagagtcaaatcccattggttaagggctcagtcccacaaacatgacagtcacttcagatgccagttgcaagtctgagtttctagtatttctgacaaggaaaaaaattggaggtccccacaaccccttcctcaggtttgagcatttgctagaatgtctcatagaactcagggaaacactttacacatgtttagctgtttattataaaacaatatgactcaggaacagccagatgatagagatgcttaaggcagggtattggataaagagcccggagcttccatgcccccttgggggcacaccactgtgcacatattcagcaacccagaagttcccaaactctgtagttcaggaatttttatggcggcttcgtcacgtaggcatgttggactgttaattaaatctctagtccttctctccttccaggaggatggggcatgatgggctgaaagttcctagcttctaatcatggcttggtctttctggtgaccagcccccatccaggagcccaccaagaattaactcattagaacaaaggacactcccgtcacccaggaaattccaaaagattaagaggcctgtgtcagaaactgggacaaagacgtgtgtgtgtgtgtgtgtgtgtgtgtgtgtgtgtgtgtgtgtgtagatatatctcttacagtatcacacttcgttacccagtattgtgtgtgtgtgtgtgtagagatacatctcttacaatatcacactttgttacccagtattgtgtgtgtgtgtgtgtgtgtgtgtagagatatatctcttacaatatcacactttgttacccagtattgtaattcttgttcctgggtagttgttttactctctgttattgttctgatgatacttacgttggaattttggaagatccaaaaactgttccactgccactaccttttcacgattttctctataattttttgatggcccagagttcttaactaaggtgtcttccatcagtgtctgacatgtttaaaatatgtgggcttttatctatattctgagcttttaaagatgctggacatctactgagtatgtaatcttcaatatatatatggacaggttctacataatgattgctaatgctgtataactgtaaaatgacatgaatcagtcatataattaattcaaagaagtctgatagaatgaaaaagtaaaagtaatttggttccattcaatttgggaggtataagaattatagtctttatattaaaaaatactggggccaggcacagtggctcacacctgtaatcctagccgtttgagaggctgaggcgaaaggattgcttgagcccaagaattttgagaccagcctgagcaacatagtgaaaccctgttctttacaaaaattacaaaaaaaagttagccagctgtcttggtgtgcctgtggtcccagctactcaggaggctgagatgagaggatcacttgagcccaggagctcaaagctgcaatgagccattatcacaccactgtattccgttgtgggtgacagagcgagaccctatctgaaaaacaaacaaacatacaaaaacaaacaattatacagtcatttcactaggagactctcagaattacttttaaagtatctcttaatctcttaagcttgatctaatattgatacataaatgcctgtcctattcaatgataaactccttatagagcctttttacaattttccttttatatatttccatctttttaaatatattccttttcaaatggttggaatacaaaaattattgtggattttattgtctctggataatctattaatctttatatactgtttattgtatattaagttataatttaaaaataaaagtatatatttatgacatacaatgtgatgttttgatatatgtatgaattgtgaaaggattaaatcaagctagttaacctatctaatgtctcaaacttttttttttttgctttttgtggagaatatttaatatctgtactctcagcaatttaaagaattatgcagtgcactattatttactatagtcaccattctgtacaatagatttccggcacccatttctcctatcaaactaaactcaataccctttgagcagcatttccccgtttctccctgcacacccctgctccctccaagcccctaacaaccaccattctactctgtttcagttattttgacttttttaggttccacatataagtgagacaatggagtatttatctttttgtgcttgacttagtttacatagcatgatgtcctcctggttcacccatgttgttgcaaatgacagaattttcttctttcttaagactgaatagtattacattgtgtattcacccacacattcaccacattttctttatccattcattggttgatgaacacttaggttgattccatatctcttggctattgtgaacagtgttgtaatgaatatgcgagagagtgcagatatctttttgacatactgatttaatttccttcagatatatacccaaaagtgggaattcttgaatcacatggtagttttattttaaaatttttaaggaacctccatactgttttctataatcgctgtactaattttatattactaccaacagtgtacaagagttcccttttctccacatccctagcaacatttatcttttgtcttattaattatgtatgaggtggtagcttattgtggttttaatctgcatttctctgatggttagtgctgttgggcatgtttatatatacacctgtgggctctttatatgtcttctttagagaaatgtctattcaggttctttgcccatttttaaataagataatttgttctcttgctattgaattgagttccttgtatattttgaatactagcttcttatcagatgtatggtttgcaaatattttttccattttgtaggttatctcttcactctgttgattgttttctttgctgtgcagaaggtttttttcttttttctttctttgagacagggtcttgctctgtcgcccagactggagtgcagtgggtgacagattgcacccagtggtgcgatcatggctcactgcagtcttgacctcccaggcttaagtgatcctcctgcttgttgtctgtgagtcaagtcttggtcctgtagcctgggcctgcaaggtacgtcctgttgtcagggtctattgggatgggcctggacctgggtcagctggagccttggccctcagggtcaggcctggatcctggggccacagatgctagcctggcaaagggtgggtctgaagcttgggactttgagagctggcctggttctggggctagtgtggagcctgtggctggcctggagtctgagtagttaggagcctgcctatagcatcaggtcccttggaatggcctggcggtgagataggtctggagccctgggtatgtggggccagcctggtggtagggcaggtctggagcatggggctgcagggtctagcctggagcctgaagctgtcggggctcacctggcactggggcaggcgtggaggctaggtttacattgtagttcaaaagctaggagtggtgaccagggcacaaaaagagatatctacagtggaagccctctaaatctgttttgaggaatgagaaaggaactcaacactcagaatatgccaaatgctcaccacccctttcctgttgttttattttctgctgccccaacccccgaccttagtggtaacatcaagaattcacataagccaaaatactgagaaaggggaaccatcctctctggtggagctatagtaccaagagttgtcaggccattctttagattattaatgaaagcttttttttttttcattcttcctagcactgtgctccagacacagatatagtcatgaagtacatgcagagcaaggttactatagccctaggtttgtcagggtaccaaaagaggagtcttagggaaatggaaagtgctgaaaagattgctgtgaggggcacctcaaagtcaaccccattaagtttttatgagctcctggagtcacccctgaacttcacaggtgtgaatttggtcctaattgtcataccatggactttagaactgacctaacagatcactgcccagcaccctgactgaccacttcagggtacacaggcagtacagatatcaatagcaaaggctttgaaaaatgtaactaacatttcctgtagtattaaagaagacttggagtttcataactcaaaacattcataatgtccggatgcaaccaaaattatatacaaagattgacatacaaattacatatgaaattgatacagaaagaactaggaaaatagcaatttgcaagggaaaagacaacagataccaactccaagagatgaccaagatattggaattatctgacaaagattttaatgcaactattataaaaatgcttctctttggggtgaaataatgaaggaaaccttttattgttactataacaattgatgcctctcttctgaagtgtaacatatttcagcctgaaaagtcttaaatttttatctctcatgtatgaaattaaatcaacaccctattttttattttattaaaaataataataaataaattcccaatgggaaaaaaattaaaaaatactccaacaagcaatcatgtgaaccttcttgaaatgaaaggaaaaataaagtcttaagaaagaaataggagatatataaagaagaacctaatgaaaattttagaaatactaaatataaagacccaaacaagaagcaaacttgatgggttcagtagcataatggaagtgactgcagaaggagttagtgaacttgaagacagatccatagaaattatccaaatctaaacaatagagagaaaagcaggggatggcggggaagagaaccacagggatctgtaggataataacagaagatctagattcataacattggagttccagaaaaagagaaggaaaaatgtggtgttaaaataatatttgaagaacttatagctgggaatttgtcaaatttggtaaacagcacaagtttacagattcaggaagctgactgaatccttaataggataaatgcaaagaaattcatactctatcactatgtgatcaatctgctgaagactaaagatgaagaaaaagtcttgaaagcagcccgagagaaataacacattacctagaggggaacaacaatttgaatgactgtagatttctcatcagaaaacgtgcagatcagaaagttgtggcaaaaataggcagaggatataaacaagaatatacacacaccaaatggccagtaaaacatatgctcagcttcattattaatgagggaaaggcaaattaaacaagaatcagataccaattcgcgttgtttagcagaaatgaaaaaaacctgagtagtattcgtgagattgtgaggaaatgggaacattaactttttgtggaaataaaaattaacgcaactgtctttggcagaaatttggttgctcttatggagtttttgcattatattatttagtagtttcgcttctatatcttgaacatgtgcacaaggagcttatatacaagcagattagacatgtgctataggaaatggttcattgcagacttccttttgaagtactataaatttggagactatctaaatcttcattagtaagagaatagatacaattgatatattcatacagtggaatactagagttaaaatgaattcgacagataaatttcaaaacataagtattaagtaaaaatggcacattgctggatgatatagtttcattacacttacatagtataaacatttgtggaggcatatatatgtaataaaagtataaaaacatgcatgtttttattctagagttaaaatgaattctagagttaaaatgaacgtccacacagataaatttcaaaacataagtattaagtaaaaatggcacattgctggatgatatagtatcattacacttacgtaatataaacatttgtggaggcatatatatgtaataaaagtataaaaacatgcttgtgattttacatattaagatatagcggttaatttggggagggatggaagaagggaaactgtattggagaactgtataatgaaaatatcagctgtgtacaactggtagtgttttagtttaaaacaaattgatgtaaatatgggaaatcttaagatttggtgaagtttgatagttgctatatcagtgtgagttatatttttcaccgtattttctatatattaaatttatttacaataagataattaacttatttgtatataattttgataattatgattgttatgaacatttacattatgaacatatttctcagctattggcactgttgaaatctgaggcctgataattctttgtggtggtaggcagtcctgtgaattctagaatatttagcagcatccctagcctctgccctttagaaatgagtagcactcttccaattgtaacaaccaaaaatgtccctagaagtccgtggtttgctcctggttgaaaatcaccaatttagagactacaaagtgctgtcacatgtgttagctcatttgaacctcacaacagccttcagaagaagatgttactttgacctcagttttacagatgaaaacactgagactcagagaaatcatctaaaaatgacagatatggaactaaaactcaggtcttattatgcccacatactgactttttgttcatttgtatgtacatgagtatatattcccacacatttcctggtaaccttactaaaagtagaatacaaattaaacattctaaaaagtttcttatttttgtatttcattcacaggcatattatttcatatctcctctagtaatttgttgatgtctgtctcaggcatcttagtgattactgggttccattgtgcttttttcatgaaaacttcttataaataattacaaattaaataaaaggagtaggtcctctacagaggactgttgtattcttctgttttgcctgggtctgtcttttttgacatgccatattttcattctgcatttggagaaaataggttaccaatagaaacttttgctgggctgcttttatttccttattaactatcatgaagtgtttatgtaaaatacttgtttacagaaatttttataaatggattttcatattcaaaatataattttggtttcaaacccaagtatcaaattcagactgtagaaattatgtacacattagtttttcatgaaaataggaaatgatattaccacataatctagatattgtggttttcaacaatgtttatttagaataaaaaccataaacttaaggggaaaaaaaatctctttcacagtgcattgtgcacttttagtcacctcgcaagagcctttcttgggcacagagaagattgagatgtaacatgtaattaagcagtcaggtattccattcatttggggtggttttttgggaattttacattttactcactaaaggatcacctagagagagccaagaaaagggtccttgagcccatgcagccattaaactttcaatggcccctaggccggacatcatttgcagagccgccttctcatccttactggccttactctcaagtcattcaactcattccttttcacagagattgctctaattagccttctaaactaatctccctgcctttagatcaggggtcatttcccactggccaaatctaggtcactcctagtttttgtagggcccataatctaagaatggtttttatatttgtaaatggttaaaaaaaattaaaaggataataatattttgtgacatataaattatatgaaatgaaaattttagtgtccataaagaaaattttattagagtagaaccacatgtgtttgttcatccagtatcgaaaaccaccaccctagtctctacactactataaggggtatctttttaaaatgcaaattattctaggtaaatgtgtttaaagatttttttaaaaaacattaagcaggtcagggttcttagttgtttctcacaatgtaatttctatgacagcacatgcaggttaacattgtgcctcactataggtgagttaaaaatgtttccatctcaagtggttgatttgataagagtaattcatatatcagtgtcatgagcattgaccttttcactaaaaagaaaatgtatcgtattttcacactgtaagcatttagaaagaactacttttacttacttcttttcttgttagagcagcttttttcttgaattccttgtaaagcatgtatacctaagcttgctgtgatagatttcatagatgtggggaatagatgcatgatagggactttagttacctaagcatgggtatacagaatgtcaggtgccaaattttcttaatagagtgtagaatttttttttttaaagagtcaaggtctccccttgtcacctaattggagtgtggtggtgtgatcatagcatagctcattgtaacctcaaattcctggcctcaagcgatcctcccaccttgggctcccaaagtgctgggattacaggtgtgaatcattttgctcagccctagaatttcttaaatagtggtcttcattagaaaggagcagtaatatagacctggagagggagggttatagggttggcagtgtaccagaattcctactgaggtactttattttggttgtggccagttgattgtcaagagaagctctcttttagtagaatgaatagacagagacaccaaacatggcttttgggaaaaacatttttttttctttagagaatatatcttttgattttatattggaagcacataggaaggttatattgtaagactaagtcttcataacctgctttgttagaatgcctctattctgtaaaggaataattgctatagttactgattagtgcttttttaacatcgtttttatgagaaaagaataaaacgggaacatgaattgaactcaaaatatttaataaatttgggtagaaattagtatcagagagatgtattgagtcaaacatccttgggttaaaatccagtttcatttttactggttttgtcattggatttcagttagtcaccatgagtttcagtgttctcagctgtgaaataggtctttacttcatagggctttgatgaactatgtaaaatacctggcagagagtacatagtaattattggctgcctttctgttcttaaatacattttagaaagaagagaaaactttaggatttttggacatattgaatattaattcacaagagagtgaggtagaaggaatcctagagggtttaaaacttagaaattaaatttgagttggcccagttgaaatactgagccttattaaaaagaatccatatttatagagttgtttacttagaatttgatatacagttaagaaggattgtaaatgttcacatttcctttaaaaggacaaaattaaagaatttaagttttaatttcaacagaggcagatcagccattcagagatgataatccatgagtagatttttgctttaatttttaaaaataatgtcaaagaaaaatttcttatatttgtctttcagataacaccttattttgtcaacatgtctatttttattcaaatgtggtaacttatatagtaacagcagaactaaaataaactgatttatatttaaaaagtattttcatactggaggaaaaaatatggttgcctatcactttgagtatctttctatgtgataagttattttacaaatctgactaaattagtggagtgttttactagattactgtggactaagagatatgaatatttcctggcaatgtacttattattttgtattgtcgtcgtatatttggaatcgattgattaaatgttactgtacttgctagtttaacagccctctacaaaatagagaatagttgatatatatacatgaattggatttaattattgctaggccttacatataataaatatacttaaaaggaagctttatatcaataatgaattaaaaaacaggccattctgtttaaaaagcaatagatgttactacacgagctctattaaaaacaataaaccatagaataagtagatgacagagcaagaatactctttattaaacctgcttgcagctactaccccttttccctgtcaagttaaaaataagacaagtgattgtatgaaagaacgaacaaaggaaattgtttgatgccttaatgcatttttcatctgattaaagtgataacaaatttataggtgtatagaccactatgttaaagattttgcttggtttagtttcatattttatattatactttacattcttaatatattaatttctgttttactgtgcctattttaatgaatttatgatgcataatttttctgtttctatataacaaaattgaggcaattatttacaataaagtaaaatttgttttagcttttcttaacatgcatgagggaatatactgttttggttatttcttaaaagaagatgtatacaatgaaatggatttgtttctatataattttaaaaatcatggtaaaataaactcaagatttatttggtttttagcttttattgatttattttataggtttattgatttttatttcataaaacatacgaatgtaattcttattatagtaaaacagtactagggattatttgatgtgctgttgtactttagacagaaaaagcagctgtaattaatttaaaagattgttttaaatcaggccttcttaactggaattctgtgactgaactttggtgttgataactttccttcattatatgcaaagtagagtatatacatatgggggaggggaaaaacacctacactttcttaagacttcaagaggggagtgtaaacccacaaaaatcagggtaagaaccattggtttatataagaaaaatcctcaaatattttaatgatccggattataggaaatacaaataaatgatcgatatagtagttttaaatgtagataatgtcagagacactgttatgtcaatctcattatctatttgcttatgctccttttaattttatgcagatggagggagcgaggaaccaccggatcgaagacagtcaagtgtagactctcgccaaagccgctctgggcaaggtaaattttcatcagattgattattaaatttcaaaaaataacgatagatatttctttctagtacttaatttggagactaggatattgccatggtatagtttagatattctagtttctcatttaggatttaaatgatatgatgtaaaaatctatatattatttattcaagatatatgaaaattaaatattgtcttgtgcctgtttttttaaatgatattaacttttaagtaattttgaagcattatggtatatatctggatatcacttttggaatggatccaaaagtgaattttcaacaccaacatttgttggagtatcatcacacactggctttttaaatttcatcaatatagtatttgttgtcttagctgtctcagaagaaatggtttttgttggtaattgctatattaggatcttcctacttatttttcttttctatttaaaatttattatcataggcctttgattaatttttgaagggacaacttcaaaactaggtaaaaacattctgagtcagtgaaatacccagttagaccttttctaacttatttaacattgcatgaccaccagctctctattcctttttctttatagtacttaccaccttcctatttattctgtttattttctctgttcaaaactagaatggatgttgcgtgatagcagtgatttttatgctttgttcactgctgtatccttatgtgccaataataagtacatagtatatagtagtcactaaataaatggtgaatgaatgatctgaaagagaatgagttgagaacccaaaatgatgaaaaatagattataaaatttcagacaatcatttattgagtttggttttcaaagaatctttaatagcataaaataaaataaagctgagatttacagatgtgcagtttttaatcctgtaaaagcttcagatttatttattctataatcgtgtccctctttttctccaagtttgctcttcccagtttttagagctgtactatttttataaaactgtttgttgcagattaaaaagaggaataatatgagttgaaaattttaacttatgctaatacttaatcatacttaagtaataagcatgtattatgactatgtctggaatttatcttattcactcttattttccctgtaaacatattttgatataaaaatgagattatgtaaaactctaaaaataaaattagtacaaattactactaaaattgtaattattaaatgtcaaattttattaagtatcaaatatagatgtttgaaatcacttatctaatttactctgagctttgtcagttaaaatatttttcaaatcaatgagcgtaattgaattttattaacaaagctaaaacttcaaacaacaaaaccagggatttctgtgatccagaggacaactacgtgatctcaatttgaagtcaccaggaattgtatcattgttagagttaattgatagtaaaagcatgtttcttaactttttagagattttatttgtaatatctctttattcaaaagaaatatatatatttttttatatggaatcttgctttgtcgcctaggctggagtgcagagtgcaatggcttgatcttggctcactgcaacctccgcctcccgggttcaagcgattctcctgcctcagcctcctgggtagatgggattacaggcccggctttttttgtatttttagtggagatgagttttcaccatattggccaggctggtctcggaacttctgacctcaagtgatccattcacctcaccctcccaaagtgctaggattacaggtgtgagccaccgcgcctggccagaaagaaaattataaaaaactatcaataatgagttgaaatgaatgagaaatagtattaggagtaaaagatgggatgagtataaaacgtttgttacctcgagaaacccactgaaagatcagtaaagaaggattggaaggagaaagtatcaacacagttttagaaactggagagtatatgaataattgaaaactgaactccaacagtagcagaggaaatcaacaaaacaacctcgagaggtctcaaaaagcttgagaatggcagtgtgtggaaatggagatgcagtgacaattggttgaaagtcagatgaagaagcattgggtttctggaacttcctccccaaaaccacctaaccagtcagctgggcaaatgctgaactcctcacccctaaccaaaagcaaaatttatccttaggagtggggaaaaccagaaacactgtagcctgggagacaccaggcatagttgagggcagaagtcccatgctaaaaatgggagaattggaccttagatatctctctcctgttttctcctactgggctcccagaatactggcagttagaccttcagatttcaggcaggaggttggaaaaaaaaagtcttttctggagaatctgaccaaaaaaaggaagataaaagaagaaagaggaaatttagtcatcagagattcctgaaataaacaggccagttagctcactccatgtatcaaagctccaaatcagcttttcagtcccctgcccttaaatatgagcagctaacaaagatgagtagatatttgaagaaactctctaaatgtatgaaagatagaagttaaatggaataaaacaacttggagagacatacatttttgcagaggaaaattatagaactattatccccagaaataagagaaaataaccatgaaacaagaaagaagtacataaaagagtgatattatgactttaaaaaaggctcttaggcattgaaattctgatagtaaaaaccaaaagcttcgtagaattatcagagactaatgtgctgaaagaaactctgaaaaaatagagcaaaaggacaaaaataagaaacgaaggaggagtgttaagaaaaatcacaggatcagtccaggaatttcagtattcaaataatagttgtcaaaagaaacaccagagaaaatggaaaagaaatcatcaagatgattcaagataattttcttaactgaagagcataaagtttcctgattgaaaaggctcactttgtgcttagtacaatggatgaaaatagatccaaactaaggcacattgtggtgaaatttgaaatcactggagccaaacagatcgttcatgcttctggggggtgggagggaatgagttggctttgcacttctcagtcgtagcattggaaactgaaaaataaagcagcatcttcagtattctgaaggaaaataattttcaatctctgaattccatatgcattgatactattattcaaatataagaatagaattagatgtatacattttcaaaaacaatctgcctgtcttatacactttctaaggaatctgttggaggatgtgatccatcaaatgaaaaagtcagccaaatgaaagaaatgaattacaagagacaggaaagtcaataaagcagaaagatccttcagaatgacaataaaaagaaggggatagagggctagcagttcagattggagtgggttagaagcctccagaagagtggtcttcaggaaaatgagattggtagaaacctgatgcaattaattgtctttagaaaagttttagacaactgatgagagtctcaaggttgaaatggtgataaatacataaaatagtaagcaaaagaaagttctgaactacagggaagataaataatgtgtaagaaaggagatgttagaataatgtcgtcagttctttagcagaatccagagtagttgatgtccaagccagtcacctccagtagaaaacgtgatcagtttacttaattatgtggtacaaatagcttcattatttatttgatttggactattatgataggaaacaatgctctaaaggagggcaagtctgacctgtgactttgtttttgtatggttggtgtatttgatttgctaagaatttaaattatttttgcatctatattcacatggaatattgacttttcattttcttgttttctaatgtctttatctggttttaatatcagaataatgctggcctcatagaataagttggaagtttcaacttcagtttcctcctcttcagtttcctaagctacatcgtgtagaattgatattatttcatccttaactgtttgatacaatttctcagaagctaattgggcttggaattttatttgctggaaggtttttaaatgtgaattcaagttatttaataaatataggactattaaaattatgtgtttcttcttgagaaacattttaatatctgcataatctgtagtgatgtaagcattctcatttctgatactggtaatttgggtattctttctcactgtcctgatcattttggacaaagatttgtcagttttatacatctcagagaatcagttttgtatttggtttctgtattgctttcctgtcttctatgtcattgatttatactttgtcctttattattttctttcttctgcctgctttgggtttaattttatctttttcttgtttcttaaggtagaatctggggtcattgatatgaaagctttctcttctaatataggaatttagtgttataaatttctgtttactgctttagttagttacatagattctgataagtagtattttcatttagttcaaaaatacccttttgattttttctttgacccatgtgttatttagaagtatgttgatgtagtttccaaacatttggaagtttttcagatatctttctcttattgattcttacttaaatttcattgtgatcagaggacaaactttctgtaggttgaatcattttaaatttgttaagacttgttttatggcccaggaaatgatctattttaataactgttctgtgtgcgctttaaaagaaagtgtattatgctgttttagggtggaaggttctataaatgtcaacctgatcacgttgattgatagtgttatttaagtcttctatcttcttgccgattttctttctacttgttgaacagcaaggaatattgaaatctcaggctataactgtggatttgtctatttctccttgcagttctgtcacattccttgtaccactggtcctctgataagaaaaattcctcttcctcagagatttatgtgtctcttcagctatagctgctggttgtgagatgggcttgcttaggaacagggctggatgagaaaggtaaaagaagaaaaagccaggggatttcccccattcacgcagtcccatatagaggccctccattcccactttctaaccagaaagagaagacttattttgtatctctttgtgtttgttcctggtgtgtagctccaggatttggattcaggcttggggtttggggtacataaaaaacagctggaaactcattgctgaactggttgtactttaagttctagttttcttccacagtttgcccactattgttttcttttctgagtctcagattgctggttcatcattctttccaggattttcagttatattcaggggttttagttacattcagttaaggcatagtgtgcttacttcatcttaaccttctgttttattacaatatagatagcactcaaaatattttaaaattagtatgcatgaacatcaacctaccaggacagatgctagttcattcagaacaaacgctagctgtagacagctgatccccatataggtgcatactgcctgataatctgccctgcctgattgtggatacagtttctatttcatgtttcttctccagtagcagcagaaatatatgttgtctgttggactgtgccaatgtcttaccctctgtgcatgagggtccttttctttcctttgtgttaacaagttccttggtctctgatctgtctctctggtacagtggattttgactcaaacatgctcatactcactgttccagtttaggggcagagacctccaatgtcttctgcttattatatgtaggagatgggagacaggctcttgaaatgtgactgtaaaactgattgtgttagtttaaccccagtatgactgccgcaggttaggtggttattttctactttccaatagcgtattatatataattgcactatattacttactatattttgtcttatttgtctattgggtctccatttttcctagtaatgtaagagtttattaatagcagggtctttgcatacagaacagtgctagtgccttgtatttaggttatcaagtttgatgaaggaaactacaattcctggaattcggattctgtatttcagaaatcttgagttactttatcagagttggtttttttgtttgttttactggctccattttctgcattaaatgatttttttcattagtgatcatatatatgtaagcaacttacttggttctagacattaagtgggtagatgaaccagcatgatatgattgaaacccagtttttattttcttttgcaaaaatagcattatgcaggcattgagttctggtgtacaagatgtgtactggtgtaatgatgtccacgaaaccagctcatgctggaagatgggaaaatgcggacgatgtggctttgcatgatttccattatttgtagccaactttatttgattaatacatgctggtgtgtcaatagaactagtatattaaattgtcaaatatactatattctgatcctctttccttgcaaatatgtaaaatatttagtagaaatgagatgtttatgctcttgaaacacacaaattattcttcagtctggaaagttacagtgatttctttattgaaccaactgtggttaattacgtagagtgacaaggaaattatttcaatattcagtgtattatttctttatctcagtataagaatatatctagtatagtagcattactaatgaataagaccgttctgtttatgtgccaggttgtaaactaggtgcataatcctcatttaattatcagaatagtgttgtgaaagtactattattttcctacaggaaatattaattttatattatattctggctttatagttatctacatcccaagtttcaaatcagtattgttggtagcatgtatttagaaccttttcattctgatatataaagtatatatttgtttgttggtggttggataatatttggaagatctgagcttaaatgataaatccctctgaaatatctttattgcttgttctgtatttcttcagaaatttaatttgttgtagattttttaaattaaaacactatttttataaaattaaacttgagatgccttttggaatacgtagccccaacttgaggccaataattcattattatttagaatgttagggatatgtcttagaatgtattgttatagtttcattaattttttaaaaagttaatttataccaaacaatgtagacatttaaaaaggatatgttaaggcttcttcctgttccactctcctaaagtaacaaatacctacattcagtttgtatctttccatgttttcctctgagctcatactggcatatgcaaggatgcgtatgcatatataaaccagtttgaaggtttttgaaaaataaaatgcagttttagttctccccttctctctcaattaacagtatagcatggccatccctccaggaacatacttaaattcttaatttcttaaaatctgtatattggttgatagtctaagtaacccattatgtattccactgtttccgcatatatgagtgttcagatttgcaaagtgattatgataattaatttataatcttaagctcttggaatacgtagccccaagcacattttgtatcagaacatattaaatagactatttagcttatgataattggcccaattaacactagaagccttgtagaagccgctccttgcttattcacctttatgatagaaaaggaataaaagcatgacaactaaaaagtttggaaggccgggcacggtgcctcatgcctgtaatcccagcactttgggaggcccaaggcgggtggatcacgagatcaggagatcaagaccatcctggctaacattgtgaaaccccgtctctactaaaaatacaaaaaaaaaaagttagctgggcgtggtggcgggcgcctgtagtcccagctacttgggaggctgaggcaggagaatggcatgaacccgggaggcggagcttgcagtgagccaaggtcttgccactacactccagcctgggcgacagagcgagactccatctcaaaaaaaagaagttcagaaaaggtatgaacatctagaaagattttattttaaaatattcttatgtgaatttttctggtaagagataaaagttataaaaaaactttgtaagtctttttgaagggtcataaacagttggataagaaattattaggaaggtatctattggtaaagcctggggaaaattattatagagttgatacattttttgttttgtttcatatgaagagcagttggttttaatgtttttttcctagtgaaagtttgaagagctagttcccacaagggggcagaataagacaaacctgaaaaccttcacactataaacacagaagtggtaaataatgtaacaaaatttattttaaatttatagttgatttattaagaaggaaggggaaatcacaaggagctagaaatgagcagagaggtaattttctgatcgtcctatgaatggtaccatatattggcatatgtacctacctgtcccccggcacatgtatggactgtagggtgatcattcagctgtggccttagattagtattgatgagtggaagttcattttgctaagtccatgtataaactccatccctttgttaatgagggtagggtagagtggctggttaggccattttcattggctgagactgactgagtccccagaacaggccatcttgtttaccaggttaagcagccccttctctgctgtgtttgctctttgtcaggtattcacatggggcatagattacttcatgtgtgttccctttcaaagagatacagccaaattctttgacaccagatatctttgtaatcagttttctaattgttccaagtctctgaatatccagtaaaaccattaaacactgtccatgagtcagtatagaacagtacctctgttatctctccttacaatcaaaatggacaatcaggccctgctcaaatttctgccacagggagggcttcacttcttcacttcaccactccttcaggaccacccctgaatggggctgctgtgctgttgtcatctacgtgtcatgcagagccatgacataactactctgccagtcacttcctgtagctgtgtcttcatccagaccaagtgatgagagaacagacagagaaaaaagcaacagcaatgaggatgtacttcacacccttgggaccacaactcctgggataagagaaaaagattcccttctctcagacttcaggtgcttgcccagtcaccactaccatatccgcctgggaactgggatggaagaaaagggggaaagggaaaaaaagggggagatttcctccagtctcttggagccataagggcccctttttctggtcctcagaccagaaagggagggattctcttggagttttttctgatcttacccagtagatacttctctgagttttgagctctccaagccaggtaaaatgcaaggaaaaaacatagtaaactcagtaccacttcagaactttaagttctgtgctccttccccagtctgcctgataatatttgttttcagtcttcagacggcttttggatattgtcaaatgctttttatggatctgatcatatggatatgatcatgtgatttttcttctttagcctgttcatgtgattgattttgttaattgattttcaagtgttgagctagtctggcatacctggtataaataccacttagtcatggtgtgtaattccttttatacatttttggatttgatttgtaaatattttattgagaatttttgcacgtacgttcatgagagaaatttctgtagtgttcttgttgtatctgtctggttttcatattaggataatgctgaccttatagaataagttaggaagtagtccttctgcttctaccttttgaaaaagattgtagagaatatgtgtaatttcttccataaatgtttagtagaatttaccagtgaacccatctgggcctggtgctttctgttttggaaggttaccagttactgattaaatttatttaatagttataggcctattcagattgtctattttttcttgtaagaattttgccagattgtgtttttcaaggaattggtcattttatctaggtcatcaaattgtgggtgtagaattgcttataatattcctgtattatccttttaatgttcatgaaatctgtggtgatacccctctttcatttctgggattagtaatttgtgtctctttctctctctctcttttttagcctggctagaagctcctcaattttattgatcttttcaattttttttcttttcaaagaaccaggacttggttttgttgatttttctctattgattcccatttccaatttcattgatttctgctctagtttttattatttcttttcttctgcttgctttgaatttaatttgctcttctttttctagtttcctaagatagatgcttagattattgattttagatctttcttttctaatatatattaagcactataaatttcagtctatcactgcatcccgcagattttgaaaagttgtatttttatttagttcaaaatattttaaaatttcttttgagatttcttctttgaactgtgtgttatttaaatgtgtgtttactatccaagtattttgggatttttcagctatctttctgttattgatttctagtttaattctgttgtggtcttagagcaaccattgtatgatttctattcttttgagtttgttaaggtgtactttattgcccagaatgtgttcacttgtaatgaacattccatgtgcgcttgaaaagaatgtgtattctgctgttgtaatgtgaagtagtccataggtgtccattataaccagttgatggatggtgctgttgagttcaactgtgtccttactgattttctgcctgctggatctgtccatttctgatagaaggctgtcaaagtctcaagtgtaatagtatattcctctatttatccgtgtagttctatccatttttgcctcatgttttgattctctcttgttacatactcatcagtcaagactgttaagtcttgttggggaattgactcctttaaagttagttttttgtaagtaacacattagttgggtctgtttttttgacccattgttacaatctctgacttttaattggtatatttagattattgacctttgaagtgattattgatatagttggattattatctgccatacttgttactattttctgtttgttgcccttcacagtttctattcgtcttctactcttttctgccatttgttgttttaattcaaaattttatataattccattttctttcctttcttatatcacttcttttttcaccttttttagtggctgcctaaaatttgcaatatatatttacataaatttaagttcactttcaaataatactgtactatttcacaggtagtacagatactgtgtaataacaaaatatccctaattcctccctggcatcccttatatcattgttgtcatttattttactcacacacacacaagcatacatgcacatgtgtgtctgtatgtgtgtgtgtatatgtatattatacatatacacatagcacacacaagcatacataatcaaatatattgttgctattattattttgaacaacttatgtgttagaacaattaagaattttttaaaaagtctttatcttcacgtattcattctctaaggcttatcctttctttatgtagatcagactttctgacctatatcattttatttctctgaagaacttttaacatttcttgcaaggcaggtcttctggcaacaaattttctgtttttgtttgggaaagtctttatttctccttcacttttgaaggatgattctgcagggtatagaattctaggtttgttttttttttaaccactttatttcattctatcttttcttgtattgtttctgaggagatatcaggtatattaataattttttctttgctttcctgtaggtaaggtttttttccctctggtttaagatgtttttgtttctctttgattttctgaagtttgaatgtgttttactgaagcatagtttgtttggcatttatcctgctgggagtactcggagctttctggtctatggtttggtatctgacattaatttggggaaatcttcagtcattattgccttaaatatttcttcttctgttattcccattatgcatatttacaccttttgtagtggttccacagttcttaggtgttctgttcttttttctgtttgcttttcagttttgaatgtttttattgacatatcctgaagctcagactctttcctcagccacgtccagtctgctaatgaggccattaaaggcattcttaatttctattctaatgtttttgatgtacgttttcttattctttcatagaagttccatctacttatattactcatctgttcttgcatgttatctactttttttcatgaaagcccatagcatattaatcataattgtttacatttatagtcagaaccagtttatagcagggtgtttaatccctgctgttgagaggtgaagccagctggacttcctgggtcaagtggggacttggagaacttttctcttacaagaggtttgtaaaacacacccattagtgctctgtagctagctagaggtttgtaaaatgcaccaatcagtgctctgtaaaaacacaccaatcagcgctctgtagctagctagaggtttgtaaaatgcaccaatcagcattctataaaatggaccaatcagcactctgtaaaatggaccaatcagcaggacatgggcggggacaaataaggaaataaaagctggccaccccagcctgcagcggcaactcactggcgtccctttctgtgctgtggaagctttgttcttttgctcttcacaataaatcttgcagctggtcactcttggttccgtgccacctttaagagctgtaacaatcaccacgaaggtctgtgtcagtgagaccacaaacccatcggaaggaaccaaatccggacacactgtaactgggtgtgtttctaatccttgctctgtctcttccaacagtatctttcgccttttaatgtgtcttgcaattttttgctgaaaggtagacatgatgttttgagtggaaggaactgtggtgaataaacctttagtaatgtagtgttcaggtgtgtgggaaaaggaagcatctaagtactttggtaagttcttgtcttttggtgagcctgtgccccttccctatgaactttaccagtgcttctctgtttttttctttgtttttctttgttttttgttttttttctcccttctcatagttaggtggaacaggatggctagaggaagctgaagtttggtatttttctttcacaagtgtggttaagctctgggaaaataatttctcctgatggttaagaagaataccattctctggtacatttcaaaatggttactttcctctgcccctcctggaagtaggagtggatttttcctcaatactgactgagagtctcatagtgctccaggagataaaactcacaaaagattggggcccctctgaaactgggtcccctcagaattttgatttctcaggcttgtctgcctgagcctccaataattcatcaactacagttcaggttttcctacttctgtattggttcccactgaggttgctgcttgtgcgtttctgcattctctatagtcacctgtctctctccaactttggcacagcagtttacattgtgacttcccttctctaaagaatgtaagaagagttgttgatttttcaacgtgtttagttttttacatgttagatgaagtgaaaacttctaagctccttacatgccagatgggaaactagaattaagctctatgcattctttccagggtttatagttgtattcaatgagagagacgaggtagggtatgcgtactccatctttcctggaattggaacctaattaaatttttcaaatatatgtccttactgatttttttaaacagtcatatgatttgtttccttgtattaattctcttgtgtagaacaagagaaaatttttggctaaaggccttcctatgtggtatatagtcataaggtttctttccagtgtgacttttcatatctttaaaggcaagaaggactgttgaagcttttctaacatattcattacatatatgatttctctcctttatatgtcctcacctttttccataggcataggttgaataacttctgaaaaccttcccagtcattgcatttatagcctttcttcccagaatgtgtctaaacatgttcagtaatattaaagttcctgctcaagactttcctgaattcaccgcattcgttgtgtttctctcatgtgtgtatagccattgtaaggtgaaagtttctgctttttcccagtcagtgctgttgtcgagttttctccaacatggatatctgctccagtgcacagtaaaatcagcgctcctactaaaggttcccacagtctttgtgttgagtttttgcccagtgtatattctcttgtgcactataaagcaagagctgtttttgaagaaatttacacactgattacagtcataaagtttgtctttggtgtgagatctcatgtaagttttggaggtgactgtagatcaaatactgtcctgctctaaaattgttcaaagggtttcttttcattttgaattctcccatgtctctgaagggaataacggttaccgaaggcttttgtagagtctttacactcatggtttgtctcttgtctatgatttctgtctcctgcagaataacattagcactccttttgaaggcttttccatatagatttcattcatagaatttatttcactaggagtcctctctgtttgcatctcactgatgcagacatactattgaaaagctgaaagttgttcattttctcatgtctgctattactactgttcaagtctgcactggagattctagtcagggcattaaagcctctgcaagtaaagatgtacctcctgtgctgagattgtgagacgaaaacaccgaaagaagaccctgggacagagcattccaggcagatggaagggccagagctgagtctccacagaagactggaggcctgagtcagctttgcccctctgcccagctaggggctaccctaatacccatgtctcaatcagtctgagttacgtgatatacaaacgagagaaagtccctactgttaagatactttcattctggaggagtgagagaaataaaagaagaaagtcatatcaggtaatgataagtgctgtgtgaattgagggggaaagtgggaagggatgaagtcagagaagttggaaggggaggaggtaagacaattaagtaggtgggtgccagatcatgtagagctttgtagaccgtggtaaggatttgggttctaattttcttctgttgctgattgactgtatgatctttaattagttattaaactttctctgcttaattttttttaatatttaatagtatgtgaatgtgtgagataattgcagtctcagagtggtataaatctttgcatgaaagaacattaggaataatttaggccaaaccccattgtttcagacatacatgaaagacctttgagaaattatgcattgttattgtgtgtattatgtttaacatgcctacagtcgttttagggaccagactaccacctgtgctgttattttaaaagtgtactttggagataaaatatccaattagaaaagttcacaaatcataagtgtacagtgagtatgttattacaaattaggttttttaaaagtcaggtttatttaatttatataagtaaaatttgccattttaagtgtacataccatgaatttttaaaacatatatagtcatgttaaataccactaaatcaaatatagcttatttccataaaaagttccctcatgcccccttgtaattagttgtctccctcaacctaatccctagcaacgacttaagtgttttctaatactatagtatttcccagaatattctgtaaatgaagccatgtagtatatagtcttttgaccgtattactgacttttttttttgagtttttttttttttgtactttaagttctagggtacatgtgcacaatgtgcaggtttgttacatatgtatacgtgtgccatgttggtgtgctgcacccattaactcatcatttacattaggtacatctcctagtgccatccctccccactttccccaccccacaacaggccccggtgtgtgatgttccccttcctgtgtccatgtgttctcattgttcagttcccacctatgagtgagaacgtgtggtatttgctgtccttgcaatagtttgctcagaatgatggtttccggcttcatccatgtccctacaaaggacacgaactcatcctttttcatggctgcatagtattccctggtgtatatgtgccacgttttcttaatccagtctatcattgatggacatttgggttggttccaagtctttgctattgtgaatagtgctgcaataaacatacgtgcgcatgtgtctttatagcagcatgatttataatcctttgggtatatagccagtaatgggatggctgggtcaaatggtatttctacttctagatccttgaggaatcaccacactgtcttccacagtggttgaactagtttacagtcacaccaacagtgtaaaagtgttcctatttctccacatcctctccagcacctgttgtttcctgactttttaatgattgccattctaactggtgtgagatggtatctcattgtggttttgatttgcatttctctgatgaccagtgatgaagaacattttttcatgtgtctgttggctgcataaatgtcttcttttgagaagtgtctgttcatatcctttgcccacttgttgatggggttgtttgttttttttttttgtaaatttgtttaagttctttgtagattctggatattagccctttgtcagatgagtagattgcaaaaattttctcccattctgtaggttgcctgttcactctgatagtggtttcttttgctgtgcagaagctccttagtttaattagatctcatttgtcaattttggcttttgttgccattgcttttggtgttttagacatgaagtccttgaccatgcctgtgtcctgaatggtattgcctaggttttcttctagggtttttatggttttaggtcttacatttaagtctttaatccatcttgaattaatttttgtataaggtgaaaggaagggatccagtttcagctttctacatatggctagccagttttcccagccccatttattaaatagggaatccttcccccatttcttgtttttctcaggtttgtcaaagatcagatggttgtagatgtgtggtattatttctgagggctctgttctgttccattggtcgatacctctgttttggtaccagtaccatgctgttttggttactgtagccttgtagtatagtttgaagtcaggtagcatgatgcctccagctttgttcttttggcttaggattgtcttagaaatgcgggccccttttttggttccatatgaactttaaagtagttttttccaattctgtgaagaaaatcattggtagcttgatggggatggcattgaatctataaattaccttgggcagtatggccattttcacaatattgattcttcctatccatgagcatggaatgttcttccatttgtttgtgtcctcttttatttcgttgagcagtggtttgtagttctccttgaagagctccttcatatcccttgtaagttggattcctaggtattttattctctttgtagcaattgtgaatgggagttcactcatgatttggctctctgtttgtctgttattggtgtataagaacatattacccatttttaatttttgtgcacacatcagaagttcattctttttattgctgagtaagattctgttgcatgtatatgtcacaatttgttcattcatcagttgatggacatttgggtacttttcagtttgtggagagtaataatttttctatttgtgtgtgggaggagggacatatatcttcatttcttttgggtaaattcctaggagctggatttctgggtcatatggtaggtttacttacaaactgccaaactgtttcccaacttatatataccagttgatattgtcaccagcagtatatgagagctgtagttcattcttgtcagcactcggttttgctggtattttttttttttagccattttactaggtgtgtagtagtaactcctagtttgaattactgtaatgattaatgatgttgagcatctgtattaggccattcttgcattgctataaagaaatacctgagactgggtagtatataaagaaaagaggtttaattggctcacaattctggaagctgtacaggaatcatggtgctggcatctgcttggcttctagggaagctttagggaactttcaatcatagtggaaggtggatggggaagccaccttctcacatggcgggagcaggagcaaggggtggagggaggtgatacatacttttaaatgaccatatctcatgagaactcactatcacgaagacagcaacaagctatgagggatccccctccggccatcatccaaacacctcccaacaggcccaccttcagtattggtgattacagttcaacatgagataggggcggggcaaatatccaaactatattatcatccatgtttcttacttagtgaagcgtctgttcagatcttttgcccatttttaaaattgggtagtttgcattcttgttcctgagttaagagttcttacagcctaactactagtcctttattagatatgtgttttgcaagtattttctttcaatcggtactgcttttcattttgtaacactatcatttgaagagtagaaatttttaatttttgtgaattccagttcatccgttttttaatatggttcatctttttgggatcctttgtaagaaatctacctgacccaaggtcacacagattttctcctgtgttttcttctaaaatgtttataattttatagttttatagtttcttctaatagttttatagtttttttttttaacattttcagtctgtgactaatttctctttgatgttttcatgagtagaggtatgcttcaaggtccgtgtttttgcatttggaggtctagtagctaacaaaattatttgttgaaaatatcctttctacactgaattatcctttcacctttgtcacaaattagttggctatatgtgtggttctttttctggatgctctagactgtttcattcattttgtgtccattgtttttctaacaccatctaagctctggattactgtaccacatagtaggtcttgaaattatatactgtttggactccagttttggttttgtttgttcaaaattgttgtggctatcctagttcttttgtttttctgtataaattttaaaattagcttattgattgctataaaagttaactgcctgctatatttccattgggattgcttcaaacctgtagatcactttggagacaattgacatagtgttatggagtcttcagatccataaacatggtacattgctccatttagcatttttgggttttgttttcatttttttagagacagtatctcactatgttgctcaggctggtcttaaactcctgagctcaagcatttcttctgtctcagcctcccaagtagtagctgggactacaggcacatgccacaactcctgactctatttaggtttctaatttctcttaccagtttcttgtagttttcagagtacatggtatgtactctgtcagatgtattcctaaatattttatgtttttagtagtgttattgtaatgatattggttaaatgttttttaaaattttccaaatgttcattgctagtatatagaaagacacttgattcttgtacattaactttgtaacctgtgaatttgccttactgacttattttttcttatagcttttttgtagataccttagaatttttacataggcaatcatgttgtctgatcatatgatcctatactcgttgttaaacttctcggggcctgtttcttgcctgacgtgtggacttgtaaggatgttacagagtcacagagtgatgatacgagctctgagttaaaaagacatttggaataatttaggcaaaactcctttgcttctgttacataatgcaaaatcgctttgtctttaggggccagtttatcaccatgctatatatttttttcctgtgtactttttaaaagtaaacttttattgaagcatgacatgtaaactgaaaaattcaccaatgatgtatacagttcactgaattatcacaagtgaacatattatgctagaggtttttgatttctaggtttttatttgtggttatttttattacttgaaaaactagaaggcagttctctagaatatgtattgtcttcaatggaagagtttctctgttaacttgaactttaatatctaataatcatttatgttaagtataatacctcgtgataactgaaatttcagttggatcatagtcactcctaacatttctttggtgtccatacactttagattctgctgcattctgacctcaacttctgaatgtctagtcaccaggtgtccagcataactgaattttttctgtcaagttagcagtttttaaattctgccacatctccatcatattatctcagtcacttttaatttggttgactgaagcaggaaaagaaaagtagaaaataaatattgagtaatgtagagtaccagtaggtgctgtcttacatgcttggtaaattggattcctcccccgccccgccttttttttttaacttcatgttataaaactatacatgtattccttatgctatgcaactttgcagaagctcccactggtataggccaagtatatgtccctgccccactgatgcttctcttggctccatgagttccttgggccagtggaatgttagtgagcagagaggtttttctttgttgtttttttcagtagagacagggtcttactctgttgcccaggccaaagtacagtagtatgatcgtagctcactgcagcctcaaactcctgggctcaattgatcctcctacttcagccttccgagtagctgggacgacaggtacgccacgcccagctaatatttttcgtttttgtagagacagtgtcttacattgttgcccacatcgatctcaaactcctggcttcaaacaaccctcctgcctcagcctcccaaagtgctgggatttcaaatgtgggccactgtgcccagccttgagcagaagtcttaagtatgttcctttgatttgacttggcctcctgcactcctcttttctgccaagaagagcatgctatgtctgttcacttgccttcagtgactgggcccaatattgaagacacatagcagtgttctgaacctgaccatagtactggtatctagctagccctatcatgcccaacctagatcagctgactcagagtcagtctgaaggctcatgagcatacaggcaatgtaaaccactgagattttgaaatcgctatttacccaggaaaaaatggtatataatcaaattctctgctcaccagtactttaaacatgtatttttagttttttctctgtagctacaataagttcaggcacaatttataggacaaagaagatggaagaaaatagttttaagcagaaaagtaaagtaggacagccaaactggactaattgcagtattattccttaaggagtgttattagtttctaaaattatcaactaatttttaacattggaacattttaagtgaaaagaggtgcttcactaaatcaaatatattgctttcgaaatactaaggctgatttttttcaataaaaggattcctcagttaaggaattacactaatggcatgcctctttgtttatgtaactgtaaaatactgcaatttcatatgaatcaatgtcagatatattcatgaaagattggaaatcaaggatgagagaaagagacttgaaaagtaagtctaggagatacagtattcatctgaccagaattccagagagagaaaagaaatgttggaagagaagatttagtcagcatagtaagtgaaagggcccagagatgaatgagaagaaaaaaagttaatcctaataaaattcctgaaatccaaggatagagaataaatcctagatttctcccaacagaagtttgggataagataatagtggcctcaactaaggtcatggttgaagaaatggagagaacatggcagattgtggatttgcctctcctgaacatttcatataagtggaataatacaaatgtggtcttttgtgtctggcttcttccacttagtacgttttcaaggcttttgaatgttgtagcatgaatcagaccttcattctttttatggctagataatacttcattgtataaatatgccacattttgtttatccgttcaccagttaatggcatttgggttgtttccactttttggctattatgtatgaataatgctgctgtgaacgttcatgttcaagtttttgcttgaaaacctgttttcgtatctttgggtatatacaaaggagtgaaatggctaagttatatggtaattctgtgtttaactttttgaggaaccaccgtcttacatttccaccagaagtgtatgaagattttaattttgccaccaacttttttttgttctcctatttttttattatacccattttagtgggtataaagtggtctctcattttggctttgtttttctgtaatgattgttgagctacattacatgttcttgttggccatttgtgtatcttctttggagaaatgtttattcaagtactttgaagtttttttttttttctttttcaagaaatggtctcactctgtcacccaggctagagtgcagtggtgtgatcatggctcactgcagcctcaacctcctgggcgcaagtgatcctcccacttgagcctcccaagtagctgggactacaggtacatgccactgtacctggctagttttttaaaaaatattttttgtagaaatgggatcccactccgttgcccaggctggtctcaaacttatgggctcaagtgatccacttgccttggcctctcaaagtcttgggattataggcatgagtcaagacacccagctttgcccatttttaaattggattgtttgtctttttgttgttgagttgaagttgttctttataccttctattaaaagtaatggcaaaaaactgcaattagttttgcaccaacctaataaatcaggggtgtccaatcttttggcttccctgggccacattggaataagtattgtcttggaccacacataaaatacaccaacagtaacgatagctgataagctttaaaaaattgcaaaaaaaaaaaaaaagtaatgttttaagaaagtttataaaatttgatttgggccacattcaaagctgtccttgtccgcatgcagcccacgggctagataagcttgttctagatgttagactctatcagatacatgatttggaaatattttctcccattatgagcattgtcttttcactctcttgatagtatcctttgttgcatacagtttttaattttgatgaaatccaattgattttttcctttaatgcttgtgcttttggtgtcatatctaagaatctatttccattctttgactctccattcatcattttaatgttttcttctgacgtatcttccagtttactgatttgatgtctaatctacatttacatctatttattaaatttttaatttcataatttcattcctctgctaaaattttaaacgtttattttcttaaacatatttagcatattattttaaattctgtccctcattgttttgtattcagtattcttatgagactatttctggtttatatggcttctgtatttactttgttcatgttatcttatctctgttattgttaattaagggctagatgctgtatgtgatcaattatataaataatttgagacctacgatgatattaccttcctccacaaagatttatgtttgtttttagtaggcactgtcaatgcaaaactgtcttaatttaattttatgggaaatatttagagctgagctttagtccctgtgagaaccagtcaagtttcagttcctactttctcctagagtatagttctttgggcttttaacaaaagtgttggagttttgctatctccactttcaccccttggtgggccttagactacacacacacacacacacacacacacacacacacacacacacacacacatacactctctctctctctctctctctctctgtgtgtatatatatatatatatatgtaaaaatttatatatatataattttataccatatgtttatggttctaattttccttgggaaaagtttatctgaagtacataattctgccattaccagaagtggaagtcaacagcatataagtagaagtaaacagcatgtaattactctttttaaaaattagaacagattcaaagatcattatataataatgtcagtcttacccacttgaatttttatgtattttcttggaggaggggagaaagaaatagagttacaatgatcctactagcaattgcacacgatggcttgctaagcagataaatacctttaatgtgtgtcttatcagaaaaaaaagtaagatcatttctttatacaacttatgtggaaattattttcttgtatttccttatatgattgcatctctcatgagatagtgaacaccttataagaaggaaccttagtttactcatcttcagtttcgtagtgctagacctggaattgagtacatagtaagtgtagaaatgaatgcatgtagtgaaaatactttgatttttcacagtgaaaatatttgttgttctggattatcctataagatgtattttaatagggaaggcaggatcttttctcaccagctcttttgttccatccccttctaacaggtggcatctccacagaaagcgactgtgcttttgagccagactacgctgtcccgccacttccagtgagtgaaggtatgcagcacattcggattatggagggcatgtctcgctctcttccatcctcccccttactcacacatcagtctatcagtgttcggctccagcctgtgaagaagttaactggtaaggactttacctaaatttagtatgtttaacaggaaacctaacgatatgacactttaggtcacgtcagatgtgtatatttgcatctttaggtttttcctctctggccttcctaatgtcacagactcttgacactaaaaaaaaaactccaactgattttaatttagagaattagaacagtactcagtttgacagattgatgtatttattttctaaatgacccatctgttgtgaacatatttttctaggttttcaggaagttcctggttttgccagaatacactgttgttctgatttcatttatcagcttgttcatgtcaggttaacagatggagacattctaattttaggataataggagcttgatagttcagcaaaggtacatcagtcgtattttatttgaaattgctatttgtatattttatatatttttttaaaagataatttagatattttcctctacactggacattaacttcttaggatatttactataattcataagttatggattatgttgactttaatatgatctcacaatatgtattacccatttagatcaagttgttaggtgtgaaactgtggctttattaaatgaacttttgtccttttacgtcttttcaggaaataaattttaatatatagttgaagaatgcttatgtgtgaaaatatgtaatcctgggtcactttgttagatttcttctagcattatcaatatatccctgatgtcagtaagttggctagtattgatgggttctaagtgcatggaggcatgaaattaagttattcacaaaggatatgtcgactgtttcctgtctgacattgagctagacagtagagaagtttgattatcattatgacaattcagaagaaaatgagaaatgaaatttttgggcacttctgtctatgtagagtgaaactttttcactgtttataattttcattaaaataatagcatttcttctatagttctacaaagcataaattatgcctctttacattgtgtattattggcattttcaaaaaataaatgaatcaaagtcactttggccgttagatacttcagtctaaagacactttggtcattagattaaaaaaataggtaaaatagcctaaaaacataatatcctgaaataccagttcccttctaatgtccaaaaatatgatgaattttatgtgattaggcttaaataaaatctcagtgcttagaaattctccctgttttacagtcaaaggtattattgattactaaaaatataaaaatcccaaatctgttggctgtcatgtgatgtgtttcattttaccacacagagtggaaaaaatagtaagtccagtttctatgtagaagtgagctggattgcctgaagttttagagataccgctttcctatcccatttgcctatcttaatttgaatgtcaacttaatagtcaacgtttattaagagataactattaaatataacaaagtcaataacatacctaatatcacagaggtattgtagtgaagcagtaatgcagagtgtaattgattaatgacatgtatgaacttttgagttttaattttacagtatttgaagcttctgtaatttctcatagtttaatttactgaagactatcaaaggcctagcaatttaatgattaagaatgcatttttaaattttggaagaaaacaactttactgaaagagtatgtcaggaaaatgtttctttggtcaattttctgccaagtgaagcagatgataagaattgtctagtttaacctggaatgaaattactttgaaattcaaaataaaaacctcagtagattattcatccattatcccttcttaacctaatcatcagttaccccttcttttctaattatatcttgttataagtaagtaaaaggaaagttgaatggaaaaaaattagccgaccgtaaagaaattttctccaaagaatggttctttcttggcattaattatcaaaatgcaataatttaatcaggccattaggactacacttagtaatttctccatttccatacattcaaactttcaagtgccttgtatgtattcatattaccaaccaaactgaatgaatagggccagaagagtcatcatattctattttctttgtgactttctaatagtctcttgtctctggcacagttaaaagcagtttgcttattattcttcagtgctttttacttaatcattcaacagatatttgtctaaggcccattacatgcctaggcactgctctagatatgatagagtggtgaaaaggaccactaagacccctgccttcaaggattttatatttcagttgagagaagatgtaataaatgcatagccagtaaataaatacttgaattttaaatggtggcaactactacaaaggtaatgcaatatggaaggggatagaaactggggttgaggtagagtttccttctatggaatgactggggagagtcaaaggaggagataattgagctgagttttcaatttaagaaggagccagccatgggaagatctgggatcggagctttccaggcagagctaacagtcagaacaaaagtcctaaagcagaaatgagcttggcatgttcaaggaatggaaagaaggcaagtgtggcctgagcagagtaagtctgaagggacagtagtagaaaatgagttagagctggggcacgatggctcatacctgtcatctcagcactttcagaggccgaggcaggaagattgcatgaggccagaagtttgagaccaccctggacaacataatgagaccttgtctctacaacaaataatttaaacaaaatagctgggtgtcatggcatgccacccatatgtagtcctagctaccaaggaggctacggtgggagtgttgcttgagcccaggaggtggagctgcaatgagctctgatcgcaccactgcactcaggcctgggaaacagaacaagcaagaccctgccactaaaaaaaataaaaataaataaataaataaaaagagttggagaggtgggcagaagccacagtttttagggtcacggtaaggagcctactctgattgcaggatttttttttttttaccttatttattctctctctattgttttttcctttttatttttatttatttatttttattatactttaagttttaggatacatgtgcacaatgtgcaggtttgttacatatgtatacatgcgccatgttggtgtgctgcacccattaactcatcatttacattaggtatatttcctaatgctatccctcccccctcctccctccccccacctctggacacaggaaggggaacatcacacaccaggattgtacgattttaaacagaggaggaacaggtagtagtatgatccaatttaccttgtaattgaatcttgttggcatgtatgtagagaatgaagtatgagggactagagtatcacatattcattagccttgtgcagtcagccctctgaattcatggattcaaccaaacacagattgaaaatatttttcttaaaaaaaccatctgtactgaacatgtagatttttttataatccctaaacaatacagtctaacaactatttgcatggcatttacattgtattagatattataagtaatttagaaaggatttgaagtatacagaaatatgtgcctaggttatatgcaaacactgtgccatttcatatcaaggatttgagcataatccaaggaaggtcctggaaccagtcccccatggatactgggggacagccacataggttttcctgatctttaaatagtcattattagtcattgtctccacttctaataaggtgggtacttatgttttcattttgtaagatatgacaaaggagtatccttttcctatcattgttactctgtaacctttatactcttaacatatttatcttagtcttccatgccggtgtatataaagactcatttgcagatataggtccatttccaaatagtttgactcattttcagtctggagggagtaagaatgggtaaagaccagctcaagaatagatatagtttagagcttgaaaactaatttttaaatgtatacacacctcactctattcagtacaaaaataagttaatgtagtaaatgtgttcaagagagacatagactttgtggtccgactgtttgggtttatatcccagctctgagtgtcacgtcacgactgtttgcttctgtttcttcatctgtaaaatggggataacaataatacaaccgacttcatgggtgtttgtcttattcttataatcacattgttttatactttttaaaaaccgtgtttaagggctcagaaagtgttagccgttattgttaataaaatttgttgagaaatttgtaaaaattgcttttcatgttagataccagtgggaactttaaagcttcatatgtttttaaagtcgcactttttaatgagtaatagcaataataatgacaataattttcattataatgcctgttgtgtggcatactcttattagcttgtgtttttgtcactggtgtctccactttacagatgagcaaattaagttcatagagaggtaaatgtcttgctgaaagtaaaatgtcttgtggaggataatacagctaggcagcggtcagagttaggattaatccccagtccctccacatgtgtctcattttaccaagaagaaaatcaaggtttagtgaaattaaatagctcatccggagcatctagtatatcaattaagatttttattgtttcaagtaataaaagatacagccaaatggtttaagcagtaaagaagacctaaaaattgggcaggtttcaaggttcgttgggcttacttaggtattgctgtgctttgggggcgatgtggaaaagagtaagcagaggctccctgtggtctctagattcttgcccagtgctccttccaagatgctttcccatagtatcataaagatcctcagcatagatagatgattaaggatgctaaaacttcattcattcaactcttacggaatttatattatttacccattatgtacatttgttaaatttagtaaaacttaaattttgcatatacatactttgggtaggggtgaaaactggtacaaccatttttatggcaatttgacaatatgtatcaaaattataaggcacataatccttaatacaccaatcttattactaggagtttgttttacaaataagcttgatcagatttgaaaatgtgtatgtatgtgcgtactatatgtgatattgtttatatagcaaaaaatgaaaatccaaatatttctcaataggaacccatgtgtgtttttaaatgatacatatgcagacatacatacacacatgcatgcgtttgttggtagcctagagagataactcttactcggaagtgggagagggatgacataagttgtgctgtatagctttctgtaagtcttatcttgtataaaatgcaaaatctcttgagacagtataacaaaatgaaccctgtcatttcctgactctgtaatctcgctcaaatttgtttaaagtctctgtacttcaattcccttatttctaaactagggttgataatagtatctaccccataggagtaataagagaattagattaattagtacatgtaaagcacgtaagacagcgtctggcatagagtaagtagtcaaaatgttagctaaattattattatagtttctaaagagatgtgggtattgagtgtttatcagctatgtcaaatatgtgttctgagcttttgcaaggtagccttcaagaaacaattacgctaagtcagtcagtctacttttctgaggagtaatcttcaaataccaacatcaaatagattattatctaatctctgggataaaaaatggcctgattttcaaagtatttgttgccaataaattggaatgaccatgtggcaatccaatttggatggtaaataagtcacaataactgatttgatcatgctgagcctggatattttagatgctagctatggccaaagccatgaataaaaaggaaacatttacttgttccagaaacatcctggggaaatctttgaaaagctcttttgacattgaaaagggcctatacatagtgttattctacatagtctgatatattttagtatattcatgatatgttctttgcataataatatacttatcctgcaatttttgaaaacctactagaattcaagatgtactgtggtgaattttatgatgggaaaaaaatacagaattgctgcaaagattaaataagatttcttaaacatatagtctaacataacaaacattaacaaatattatttttcttctcatttatatcttggaaaaaatggaaacatagtcttgttttataaacatcctggaaaaattactgaaaagtgaattggaaaatataaagggcctgtagatagtattagtctctatagtcaagatttatttcagcatacttataatactgtggcatctgagtaaatatcttgcaattttaggataaacattggaattcataatatagtataatgaatttgttagattaaaaaatataggagacatgcatggtagtcttaagttccatcattactaactgttagagaccacatgtttttgtaaggttaaatgaggaaatatatactaagacttttaagctcttttggaataatagactaattaaactattagatctggacctcattcagggtactgtttctaatttggtttctaacttcagattctctggtttatgagataaagattaggctattgtaaaacagtgtaggattggaaaaaagggggggcccttatttccttgaagaggttatttctgtagtcttccaaatcaaaagtagagaatgttagagggttattacttaattcaatataataatttcaattatcatgagtcagtattgttaaagaaaaccagagctcgacagtaaagtggtaaaaacagattttagtaaggctctattgcaatagtatagaactgggctcaattctgaatatagtaaagaatgttggggatttatagctaaggagcagagtggggcagaggatagaatcagtggatggaaaattattaagaggaagcttcaagagtaaggggattattgccgaaccaactaaacagtgccttgctgaaggcaagccatgttgaccagattatcaagggtagggggattctcactaaactgagttagcaggattcttgctacaactgggccaggaggcgtgaggacaaggcccacgcaagaacgttgaaaagaggtatcagaggaacctgactaaagtttggttaaggggtgagcctttgccactgcgtatatgttgaacacctaaaaggcggcatgaattatcaaacaaataatccttttgtgatatttgcacacactggatttcaaaataattaaaccttctctttttatatttaacctgtgaggttttagacaagaaagtaattttctagttttttttcttttcatatttgaatggaagtcactcatacaaagtgaaagttttatttatagtattgtagtgtttatttataaaaggattatttgtagtaagtgtagtattactgtatgtattcttttgaaatatagtagccttgtcttcctacctctattcagccaccactagggaaagtttgcgaaagtgcccaaatgacccttaatgaagagagagccaaaataacaagtcattgatacttttaagatgaagtggtttcatttctgtcaggttagatgatttgcaaggttatgatgaaaattggaatggaagaaaaacaataagaaaaatatttttaaaagtcaaataagataaaataagttgcttgtcacaagaaagtgatttcagtttcccttataaagacaaagttatcagaatgtataaaaagcatttccagggagtgttatttataatagatgcttctaaacaaattgagaggaagcttacaaataaaggaatgaaaaatatataccaaataaatgttgagaaaaggatagtattatttgcaataatattaaacacaaataaaaaagttttatttgatattttatgcagatacaattcatgaagtagatgttaacgattattgcttttttatgcatgagacaacatggcatcaaaatgtataaagttatccaagagaaaagaaaacatatgttcacaccaaaacttgtacatgtatgttcatagcagcattattcataatagccaaagagtgaaaacagtttgatgttcatcagctgatgagtggataaataaaaagtgatatattcgtattatttggcattaaaaataaatgctttcatgatccatggtgaaccttgaaaacgttacactaagtgaaggaaaccagtcacaaaagaacatatgttatacaattgcagttatatgaaatgtccagaataggcaagtaatctatagagacagaatgttaattggtggttacctaagggaaaggggtcaccaacgatggtataggtagtgaatgcttaagggtatagggtttcattttggggtgatgaaaatgttctaaacttagattatgctgacaattgtacaactctgtgaatgaactaaatccattaaattgtacttatatctcaataaggaagttttttaaaaataaaaacttcatatagtaaacattagcaatgaaagggaaagttgatgaatttatatttaacccatttatgccagaggctacaaattttttcatgtcaaaaatcagaccttggccatgaccttgagcagtaggatataaataactcccacaagcttagcgttccaatagtggaacactaggcataaatgagttaaggcagatttcatgcctcataaaatgaacagctcattaaaggatatggataatttgaataataagcaattaaacttaactcattatatttcagaattgctaaaatacttggaatgttctaaacaaaaagaaataagtgtttgaggtgatggatatctcagttaccctgatttgatcattacatattatatgcctgtatccagatattacatataccccataaatatgtaaagttaatatgtgtcaagtttttaaaagcttaattcagccgagtgtagaacctcatactgaaaaacataagatttcttatacttgtattgttttccagcacttgtgaactgtttataaaagttgattataggccagacgttgtggctcacgcctgtaatcccagcacttcgggaggccgaggcgggcagatcagaggccaagagatcgagaccatcctggccaacatggtgaaactccatctctactaaaaatacaaaaatcagctgggtgtggtgtcatgtgcctgtagtcccagctccttgggaggctgaggcaggagaatcccttgaacccgtgaggcagaggttgcagtgagccaagatcatgcggctgcactccagcctggtgacagagcaagactccatctcaaaaaaaatataaataaataaataaaaataaaaaattttaaaaagttgattatatagttggccataaagaaatctctgtacaatgcacatatttttcattgaaaatcaaaatagaatctaacaacaaagaagatagggagaaatttcttttctacttctaaaattttaaagttttaaaataactttttaaaataacttttgggttaaaacagaaaccaaaattgaaaaaaaagttggaaattaacatgtattatgtattaaaacttatgaaatgtagccaaagtggtactctatggaaaagtcattaccttgaatacttttattagaaaacaagaagtactgaaaataaatgaactaataaggagatcgaggaagacatagtaaacatgaagtaatcaataaagttaaaagggaaaatgaataagcaaaaaactagtacttgatcagtaaagccagtttccttgaaaagactaagataatagagcaatctttgatagaagtgatcaaaatgaaaaagagggagtgagaaaagataacatacagaacatacagaacaagaaattagtcactaatctttttattataagggaatacagcatatagctttatagcaaaacaatacacacaaaaaaaccttgaatgagatggaagaaaactgctgtaaatttgactcaagaaaacttaaaattatgactagcctggtaaccatagaaatcaaagatctccaagagtcatcagacctagatgattttacaggcgagttttagctaaacttacaagtaataattataataatagtagtagtaattaaagataatattttttgagctgttaccctattctagacagtgttaagtaatttacctatatgagcaaatttaatcttcacagcaaacttagtggatagtcaacagtctctgtgtgaacactttcagtgatagtgagctttcttctttgtaacatagcctgctcctttgttcagtagttttaactgtcagttctctaatttacatggatggaaatgtcctcctttattgctcctacccattagtcctagttctgccttgtagaactatacgacataaattaacctcttctttcacgtggcagtcttttatatcctggaaagcagccatgatgtctacttttctgtagcttaaaagactttatttacagcctgtctgataccaagatggtagtacagctgtgttattttcatcatcttctgctctagtaaccatatgaaaatgggcatgagattactttgaaattactcttccttgtgaccccttatcaactttcagtgagcattttttttcttttgagaaattgaatagaaactcctagtgtccacattttgacatcctttagtcctgtagttctgtgaagttcctgcatggctttacagaaactgttattggtagtttcatgttcatgtcttcctgtccttttagaattctgaaaggtaaattgtgtgggtctggattttgattatgtgtattttaacttgtcctcaaaacttggtctttaatgtcctcttaatgatgtttattaaatataattttcttaatggagaacattaaagcaaaatcagagttgtcttaatttgtttaggttgctataagaaaaaacctctgggactgggtaattcataaagaacagaaatctattttctcacagttctggtggctgggaagtctaagatcaaggcaccagcaggtttggttgtctggtgagggctgctgtctgcttccaagataacaccttgttgctgcatcttccaggagggagggacatttcgtccacacctgagggaagatggaggtgtgacataacctaactctgtagcctctttgataaggtcttaatcccagccacaaagggaggagcctttatatggcttaactaccgcttaagggttctacctctttctactgtcatactggcctttaaatttcaacacctgaattttggaggacacgttcaaaccatagcaccaagggttgagtaatggattgttctgtctcttacttagagcaggatattgttaaacatggcagactttggagtcagatatacttggttgaaaccgtgactttgctacttattaactgtatgaccttggccgtgtcacttgactactctgagtatgttttgttacctgtattgtattattggtatttctgcatcacagagtattgtatggattaagtaagatatcatggccgggaatggtggctcacacctgtaatcccagcaatttgggaggccaaggtggaggatttcctgagctcaggagtttgagaatagcctgggcaacatctcaaaatcctgtttctactaaaaatacaaaaaaaattagctgggtgtggtggcatgcacctgtaatcccagctactcgggaggctgaggctggagaatcgcttgaacccgagaggtggaggttgcagtgagctgagatagcaccactgacagagtgagactctgtctccctgccaaaaaagtaattaattaaataagatgtgtgtcaagaacttagtaaagagtttagctcgtagaaggtgattcataaatgaaagcttataataaaatcactacataatttatctttcccatgcagcagatctgtcctgtccttgtctgttttttaattctaaaaacatcccagcaatcctttttgctatcttcaaaacatagctcttctcaactggggctctattcttcgtggacaatattgttagatggttttctactcttcatctttgattatggttttctactcttcatctttgattatttccccctctctttgtatatttctttttcaggcacaatctgtctttatcaaaaaatttctgatatggcaatatttttttagatgcttccatatgtttatgattgtataaattgctttttattttatttatttatttttttgagactgtatctcactctgtcaccaggctggagtgcagtggcacaatctcagctcactgcaacctccgcctcccaggttcaagtgattctcctgcctcagcctcctgagtagctgggattacaggcgtgcaccaccatgcccagctaatttttgtatttttagtagagacggggtttcaccatgttggccaggatggtctcgatctcctgaccttgtgatccgcccgcctcggccttccaaagtgctggggttacaggcgtgagccaccgcgcccggccattgctttttatttttaatctataccctcaaaccatattctcttttaaaattattgaccatgggctcatagcttcttttctctacatttttaaagaaatgtttgcctaaatctgaagtgttgaattgacggtccagcattccttttagtgctgtgaccaatgaagggtcaaaccaaggacacctaggacctgagatggagaaggcaagttagtaagataacagtgtggtagcactcatgaagtagatgcataagcagaccctaaagattagggtggatcagcagtagggtaattgttaggtgtcacaggaagtaagtggaacctgttaatccaagggaatctagggggaggcagtaggcaaagttccagggaggacaagtagtcagcaccaagaaaaatgtctaacattgaggtcactgtgtaaggtaatgttgtttttcaacagatctttatggaatgtctgtaatgtggcagggttaaggctcagaactctaggacccaaagaactgatagggtcacactggtcaagaacccagctgaacgaagaacccgtttagagttctacatagtcatttgtaaactctgggcagattagttctttttgatcttctgtttcttcatatgtacagtgaagataataacaccttaaggctgagaggaatacagaaatgtgtgtagagtttctttttgtgccaagcacttcttgtgacaaacaaggggaaataataaaaagaatcctaacatgtgaaaaagttgtcaatcacttgattaatatcctttttagctcctgtgttgtgtttccaagaattgggtatcagttttaaacatggaaaataccatgaagattacagaaaaaaatccttcattgtccatccttcttctgtgaccttccccagaaaactcaccatgatttatgccatggtccctaggaagtctaatttttttacttaattgaccttgtccttctttacttgcttaacttcccacctgctatggaatgtgagcagtttagaaagtggcaaatgtggaatttaagggctaaacaattttggccatgaggaatacttttcagtcacaaagcatcacaaaagtcaaataaatatccacgattcaaaagaaagccttagtaactctctaaacaggaaataaattatagtatgggataatataaagcttagaacagaatatatgttcacattataacaacagaaatttttataatgctaaactatatatttattctcattatagaaaattatgcacccaaattgacattcagcccataagagtaataaacacgtggcatggcagagtaactccctctcttagaggaggattttaaacaccagagggcagagtgttccagaggacattttcagttcagctggcctttcttaattgtaaatgcgcatccttaccttgtccgtcagtcattcatgtcgtgggcagaatttcaaaagttaagaaatgtggttatttcattttacttatttttttcttaagacacagagtcctgctttgtcacccagactggagtgtggtggcacaatcactgctcattgcagcctcaacctcctggggtcaagagatcttcccacctcagcctcctgagtagctgggactacaggcgtgcaccaccatacctggctaattttttcattattttgtagagatggggtcttgctatgttgcccaggctggtctaaagtcctgggctcaagcaaccctctcacctcggtctcccaaagcactgagattacaggtgtgaaccactgtgcccagccaagaaatatggtcattttagaattgtctatgtggtattatctgttttgatgactttgtttagatagcacaatgagcagtgttttgagttataccagagttggttgaacatctctgttttccccatttctggttaatgttcatgtttctgatttctgaaaacgatttttagaaaaaattatgtatacatctatatcattcagtaaattttataactttagattaatgaagtaagtaaagtgagagaaaggagatttgatatgtgtatcttatggctcagtatgcccttttatgccctgcttatcaataaaaacattctgaaagaaccacctgccaactcatgacctttttcaaatgttacaattatcatttagaggtagcatcacacatttgggataattttattcagggtttagatagtaaagtcaacatataaaataaaaactgagtataaagaaaattatcctcagaaatccattacatatcattcacgacattcattaaacagaaatactgcttctcagtatatccaaccctgccagtttatcctttagagttgtaactattttactctttactctctttttctttgaccaccagatgaagtagttggctgatgtatagggatcacatatatgatttttaagaatatatttctttttcttctctgtcactcattaccctactgctgcagattgaagtcctgatctgaagcagtagccattgctaggaaagacacaaccccgcgtagaaagttggccaaagcttgaattgctatagctagtagaatggttactttcttaactcctgtgagaatagagatttcgtatgtacatctcttcataaatattaccctacctttaagcacaatagagtttagcacggatgattactccttagagaaagcttttaatatagcaagactgaaaaaagaataaaaataaaaaagaatgtaaaactgtataagttttagcatgacttacctaaattaatcataaaggagttaaaaattagtaaccaaggggaagagcttaactccttaaatctctctccacccttaagttaaatccaatttttcaagcaaaacaaaacctgtgtactttgtcttttgaagtattttaatcatgtcctcatcccagttagctcctacacagcataagcaacgttagaaaaaattatttgttgtccaagtttacattttttgcagaacttttctggtatctctctaatgcaaagatctgctcaacatgacttgatgatggggaggtgggagagaaagttgctctttttacctaagatattgaataattagtattctaaaaagtcacaactgaagagaatttccctcaaaaataactactggcacaagacaatatttgagttaaaaaacttactaggtagaagagattagattatccaggaaacagaatgagataggctgtccatggaatttccaagtcaaacataatagctcatttttgagtttgccctacagttttctagttaggtaggataaaaagtaataggttattttaaacaactcaatcactttgcatgttctttgatattaaccattccatagaaaccacttatacttctttattaccaagttactattttctgaagacatttataagtcatgttgaggcagtagaattacttgtacattattatattaaataatccttgaacgctagtccgcagtatctgtatctactataattctaaaaagaaatagctactagctacttgtgaaaagtatatgcagtgtgatgggacacaatatccagtcaaacataaaacctagcctggaaaaatatttaccctttcaggcaattttctgtgtttatggagttctattgaaattccacttttcatttttctttgctgttttgcttagatactattaaaaaagataatatagatgtttagaattttaagcctttgctttgtatttatttttttctattcccacagtagctttaggaataaggtagaaaatgctttactgagatgaatcagtgggtcagagtagttaggtgccttactcagggttatatttagaagtagcaaagctgttagtccaactacagtcaagactagtcaaatgcatgtccatcccactacattgcaattctttttagtcacattttactgaggttcttcatttatggagataaatgcatcataaatctatgaccaacaaatacgtaacttttccagaattggtattataatggcagtgttgcccatgtaagagaatggtataataggtaaatttacctaatattttgctttgtattgtatctgaatattgcattaaataaatggtgatggaaaagtaacacagagatatgatatagaacaatttcatatagaactaccctatataaatagatgaaatatcatagcatcagtgacccatgcttaataaatctaatgaaagatatttttctgcaccagtcatctcagagcaacatccagaagactatagagagagtaccattacgacaattctatgcattggtgctttcactggctccctcttctcctgtgataccgtttggaagctatcctactatcccctggaagggggagctcttcctaattcctgggaggtgagggaaaactatgacaagaaaacgattgtccaggcccagttagggagaggcctttagaagcatggagtggaccagtaaccctgtcttacaagtgattgacggagaagttttcttgttcatgaatgaaggctatgagcatttttagtgaagtaagtgtcttttgaaactttctttatctagaaggaatacaggtgatagtatgcctctctttgaaattggtgtcattgctactttattagtcaatcagttgatagtgctgcagttttggcatatctgatgcataccatctgaatgaaaggcatttaattagggttttaatatctctaagtatttaaaaatgaattttctgctatctcaaactctagacagttccttacattgcaacaaaatcactgtataattttaacacttaataaattatggagatactgcagacctatattagcttgctaaagtattaatattttaaattacctcaattgcattttttgttggtgcctactaagtaactgttttacagcgtatattcacacagctctgattcagaaaatcagaagagcaaaacatgagaaggaaacagtaagagaggagtttacagctttaaggcatgaggagcttacagctttttaatataaattgttcccagaatccatgtcacagatccttatatggtgctgcttttttcctcttggttgctatgacaacagcagcactgcaccattcatcagctctggacctgggctgcactgctagccttccttgttactcctgaatgttaagaagaacatccgtgaatcattcactctgttaacgctgcgccattagaaacctaagaaccagttcttccagtaatttgctctaacagagggtgaactaaactgcgccacagagaaaaattgtgtaaaaatatttcttttatcctaatggaatcatacaacctatatttgctgcagtattctgaaaggacaagcttatgtcaaccaatctaatgaaaagaactcgtctgtgtaatctcttgaaatcattagttgttcaaaacagaataccacagtgcttctctggatacaaaaagaagcaggtgatgttgttaggggttctaaacccctttgggagcatctcttgtgctttgggaccataatcaacatctgctataagaagtatcacctgtaacgcacagtaagttctgggcagcgtaaagagctggctggagattaaagtgtgggtcattcctgatgtgtcaggtctgataacaacatgaccagtgaataagaagcctttcagcttttctaggggaaaagactctgtagtattgactagtgaggaagaaaaactaaaacctgtgagtatgatgagtagagtatttgttacgtggatttctgagctgtaaagtctactttgttctttatagaaaaataaacacagcctaagataatttgacatctagttttcaaggaagccattaagaagctgtattttggcacatttatttaatttttaattgtgtgttcttttgctttatatatttatatgcatatatgaaccttttgaaatggttttatattttaaaaaagaatatgcattgcagagaagcctgttaaaaactcaatttttcaatgtaaatgtgaaggttagattgtctctcctgttagattgcaattccagaatagagctctacttcctgttgcagtatccttataaataaaataccttttttaaaaaataacaatatggaaatctagaattttgtaaacaagctttcttaatacataaaatcattcttgttatttcattaactggagtgtttacaaatggactttcttagtttaagaattttttttaacaacacaatttgcaagttatgatatttattgtcttattttctcagttgagtttagactaaattagaaatttacctttgtttacttgtatttttagatcatttggtaattatcaacaagatatattgattttatatactgacttttcttaaaagactctttgttttctggcttttaattattttctctttttagttcctcagctaaccatggtaacttagaaatgtcttgaaagtaggaacttggtttttcaaaattaggatatttgtagtgatcttcagccacttcaaaaaagaaaaagatattttcatttagtcttattctttcaattacttgtcttcctaagttgctcttattgatttattgattgattgagacagggttgcccaggttggagtgcagtggtgcaatgatggcttgctgcagcctcgacctcccaggctcaagccatcctcctccctcaccctattgagtagcttggactacaggcatgtgccaccatatccaactaatttttttttttttttttttttgagacagagtctcgctctgtcgcccaggctggagtgtagtggtgcgaactcagctcactgctgcaagctctgcctcccgggttcacaccatactcctgcctcagcctcctgagtagctaggactacaggcgcccaccaccacgcccggctaatttttgtatttttagtagagatggggtttcaccatgttagccagggatggtctcgatctcctgaccccgtgatccgcccaccccagcctcccaaagtgctgggattacaggagtgagccaccacacccggccctccaactaatttttttaaaacatttttatagagatgaagtctcatgttgcctaggctgatctcaaacttgggctcaagcagtcctcccaccttggcctccccaagtgctgggattacaggtatgagctgtggctcccagtctgagttgctcttctgaaatgcactttatttggaaaatatatacgtcagtgatatgactaggttattttaatttacacaattagcaaaagaagatttttgttattttgtcattataccattcaatttctattccttcttccatttttgagactttgcctatctgtttatacaagtgcctttgcccaatgtttagaaagcctttaaatagggagaattaatatgttaagggataatgaaagggttaatcatttgtattaacagttatatatgtcattaataacaagattttgcttccgtcatctataacggatcaaataaatattcacattttaactattgctctgcaagtaaataaaataggaattttaaattttatgtatatttaataattgtgtacattataagttaatgcttctttatgactatcctcacacatgtatgtatagaaacaaaggattttatatatccattatctctgaaactataatttttattaacagtagcaaagaggccgggtgccatggctcacacctgtaattccagcactttgtgaggctgagatgggaagatcccttgaggccaggagttcaagactagcctgggcagcacaaggagaccccatctctacaaataatttttttaaaaaattagccaggcatgattgcacatgcctctggtcccagctacttgggaggctgaggcaggagaatcacctaagcctgggaggttgaggctgcagtgacccatgatcactccactatcactccactgcactccagaccaagtgacatagtgagaccctgggcaacagagcaagactctgtctcataaaaaaaaaaaaaattaataacaaagactggtttaggtactttttaatgaggttagtatttttattagcagatttattcattttcaagtaatctttcttgaccatatcctttggtattttttttttatgtttgggatcttattatatattccttaaagattgtatattaacctatttgtttgtttgtaaactggctaatgtaaaatccactatagacctccctattttaagagatgctgcagtaagtccttttataataatccctattatgctgatttggtgaatctgtatgtatgttaggttttcttaaaggccatccagtttatttcagcatgtaaaaattcaagttgcagatttaactggcagagttctatgaaaaaaataagacttaatactttggatgatcatttagcccctcaatttcaaactagtttgacaacttccatcttactttctgaaattctttaaaaagtcttttcaaggccaggtggtgactcatgcttgtaatcccaccactttgggaggctgatgtgggtggattgcttgagctcaggagttggagaccagcctgggcaaatggtgaaaccctgtctttacaaaaaatacaaaaaattatccaggcatggtggtgcacacctctggtcccagctgcttgggaggtttaggtaggagaatcgcctgaggctgggaaggtaaagttgtagtgagccgtgattacttcattgcattccagcctgggtgacagtatgagaccctgtctcaaaaaaaaaaaaaaaaaaaaaaaaaaaactattcaatattgttcatataacatacaactgggtaaaatcttagttaatagtaggcgttacttttttggggggagggaatgtgctagtgaatagaatataacaatttcaaatgtaaactcttaggttttttcccctggttttcactaactgaaacttaaacatgttgtcctaataacacttctgaatatctgggaatttgttagtaataagcttttattagaaaataaatacctcatttctgttagagtctacattaagacatgaaggactcctattggtgataaattattttaaaagggtcatttctagtcatcctagctattttttctcatgggaattaatcataatatttcggtgataaatgtgtgttttttatcactccaacattatgtaagaaaacatttttaccactgtaaactttgcagcttaggacaggttaacttctgtgaggtttctcttctataagatgaatgaagtagtgcatttttgtagtgtcattgtaggcattaagaaaaatatatagataaagcatctagtatagtacttgacacaggggaagcattctcttagtctttgatacttactttccccccattcctctccattggcctacatcagtgatttttggacttttctttgggagctcctttaaggcaaaggcatttgaatacttaccaaagggatctgggatgtagcctgaagtggtacccaaaaggaaacctggaaatttcttgcaaatctcatatttctttaaaactgtgtacattctacatgtatttttattttataataaaaatgtttcccaaaaaaatctttaagtaaaactcactcttcaggaaaatatactacattttctcctataaatttgcataccccaacataatactcctcacctatatgtattccccagttgaagacatgctacttagatcatcgggtctgggtatcattttaaaaatagaaattctaattagctgggtgtggtggcatacatatgcctgtagtcccagctacttgggaggctgaggtgggaggatcgcttgagcccaggagttctaggatgcagtgagctgtgattgtaccactgcactgtagcctgggccacagagtgagacttcatctcttgcggggggaggggggaagagggggaggggagggtgcatatttccctggagaaagagattgagaatcaagaggcaaggatgaaaaactcaatctggttgaatctggaaggcttactcagttcaaaaaagtgaatagtggtttgaagttgagttaagctgtagtgggatgagaaaggaatatttcatgtcggaactagagaagaatgatgatagagaaacggtttagcattttaaagcctgagaagtcctacaataaagggaactttttaattgtttaatctagcatctctaaaacttgacagcagacactttatttcttacatgcccctgcaaaaccatgtggaacaagtaagtgttccaaggagcatgctttaggaaataactgaccaaagaaagttatgtcatttagaaggaaagaagagtggttaactgcacaaaatgaagtatgaaagaaatcatcttagcactccagaagatatggaaacatggctgggtctagtggctcatgcctgtaatcccagcactttgggaagccaaggcaggtggattacttgaggtcaggagtttgagaccagcctggtcaacatggtgaaaccccgtctctactaaaaatacaaaacttagccaggcatggtggtgcatgcctgtaatcccagctacttgggtggcacaagaatcacttgaaacctgggaggtagaggttatagtgagccgagatcacaccactgtactccagcctgggcgacagagtgagactgtatctcaaaaaagaaacaaaacaaaaacagaagattatggaaacataatttactcagattccccagataaattatactttgctttaatattttaaagatgagtgtgttttttaaattggagaaaatattgtttattatgtagactagaaagtaaaatggtaaagtgacttaagtaaaatctcagaagcaaaagtgtacaaaatgcattcaagtggtaaataaatcagtttgtctggaacagaggtttcatgaaggatgctctggaagagacaactgggaccaaaatgacgaagccattagggcagtgataacctaacatggtagccatggaaaatgtataaagagaaaaagattttggaggaataagcagattggtgactggccagctatagagtacaggaatatgaaagatctgccaaagatgattatacaattttaagaagaaaaatgatggctttgctaataggaaaagcttagacagatagctgattttaagagattgatagacattgagttcagggtggtaggacgatataagaggggaaatgtgggccaggcgcggtggctcacgcctgtaatcccagcactttgggaggctgaggcgggcggatcacaaggtcaggagatcaagaccatactggctggcgcagtggaatcctgtctctactaaaaatacaaaaaaaattagccagatgtgatggctggcgcctgtggtcccagctgctggggaggctgaggcaggagagttgcttgaacccgggaggcggagcttgcagtgagccgagattgcgccactgcactccagcctgggcgacaaggtgagattctgtctcaaaaaaaaaaaaagaaaaaggggaaatgtgttttcagcactttgaaaataagtaaggttttaagctgtaaatttggaagttatacccgtagagagtatagttaaaactgtagagtaggtaaaatctttttttttttttttttttttttgagatggagcctcgctgtcacccaggctagagtccagtgacactatcttggctcactgcaacctctgctcactgcaacctctgcctcctgagttcaagcaattctctgcctcagcctcccgagtagctgggattacaggtacctgccaccacgcccagctgattttttttatttttagtagagatggggtttcaccatcttggccaggctggtcttgaatgtctgaccttgtgatccacccgccttggcctcccaaagtgctgggatcacaggcatgagccacagcgcccggccataaggtctctttaggatgcgaattgaacaaatagaaaaggtagaaagtaaatatttcataagaatttacgaggaattttcatgtttactcattttgtcttttcgttggcactttgaattattatggccctaatcttatttatgaagaaaacaagacctaatcaggctaaccatgaagaatttaggcataagagatcagagctccaacttagacctctctctaacttcagtatctgttctcggggatcaagaagtaaatcttaagaaatacaacctaagggaccaaaagagaaaaacccactttaaaaaacaaatgagatgaataaggagcagtatgaaagatattgaaggaaccaagatggtgtaacttttgctggaaactgaggcttggaaccgtttgagtgactaggatcatgattttcttgacatatgattctgccttttgctctcctgaactgtagtccaaactcttagctgcagtggtctacatttggcaaatatttgtattctgtttcattaaagaggagaaagaaagagagaggctacataaaatcggtgggagaaggaagcatttaatgagaaacttacagtcaaatacacttcttagagttctaattgctttttggtgtctgtgatatatagtcacatgtagcagggatccccaacgctcaggctgcagactagtaccagtccgtggcctattaggaactgggcggcacagcaggatgtgagcctgcaggcgagcaagcattactgcttgagctccgcctcctgtcagatcagcagaggcactagattctcacaggagcatgaaccctattatgaaatgcacatctgagggatctaggttgcttgccccttatgagactctaacgcctgatgatctgaggtggaacagttacatctcaaaaccatccccacccccaacaaaaattgtcttccgcaaaatgggtctctggtgcccaaaagattggggaccactgatacataggactctttaagacttttaaaaatgaaatgtttctctttctccattcaacatccttactccagtaaatttctcgttaagatagctgaaaggatccctaaagcagttaactgttttaccttaactcctgcaatatgatgtaatagttcagatcctgcgcttactagcagtgtgacgttgggcaagttgtataacttctctgtgcttcagtttcctcatctgtgaaatgagtataacaactcccttaggatttgtaagaattaaaggaatttttacaggaaaaatgcttacaacagcctctagtacatagtaactgtccaataatgatagttgatgatgatgctgtcacttaatagcaactgcatgatcctatgtatctctctatacctttctttaaagtcctgtgtacttttcctttttttctttgttgagaagggaagccgttttttacctttactaggtaggctgagttttttaagtgagcagagagtagttacaacttgaatcagaaggcttaaatttatatgacaatataaacatgcctggatttagaaaacatcttgctgtcaaatggatactggtggtgtcctctcctgataacagtaatattgtaaccattaatgttcagagtatttcattgtgagtttatattacttcctgtgggaactggtttcatattcagtccaaaacacttgataagtatgtagtttctccttccttgttttatttaaaagaaccctttaccaaaaaagtatgataaatatattgtcacattgttatgatataatgagaagctttgatataattgtggtaaaattatacattcagtacacagcaggccttttcatcttagcatttattacaaatttaagttttaaattagttagcaatataatgtagcgtaagcttatcttacatagtttgtgtactctggagccagactgcctggatttgaattctgactgatatgccttacttctgtgtccttgggcaagtaacttaacctctccctcagtttccgcatctgcaaaaagcaggtagtaatagtacctactacttcctagggttattatgaggattacatgagtgaatgactttgaacagttttgatcacaataagtgctcaattattgctgttattatttagtatttgtgtggtttacgtcttgtctccctaaaagggagagagagtatttgtcctttttattattatatcctcagtctttagcacaatgcctggcatatagtagatgttcaataaatatttactgaataaatcaataaaacatcctgcacttacctagagcttcaataatattcttagcttgaatgccttcggctaagcaggccaaagcagataacactattatgatgttaagagcctttactcactaaggtttttttagtggggggtttagttgttgctgctgttgttttttgacggagtcttcttctgtcgcccaggctggagtgtagtggtgcagtctcggctcacttgcaacctccacctcctgggttcaagcgattctcctgcctcagcctcccaagtagctgggactacaggtgcatgccaccacactggctgatttttttattttttaatagagatggagtttcactgtgttggccaggctggtcttgaattcctagcctcaggtgatcagcctgcctcggcctcccaaagtgttgggattacaagcatgagccaccatgcccgactcactaaggttttattaaagtgagatcttgaaaatttgtgactcactgttttatttattgatcagacttgtgatggtaaacactttacaactgaggctagaagtaagtatgacacatgagtcacgttccttttacctccccaccccccactgattcttaggactctaacagtattatagtgcctagaaaagaaagaaatagctctcttcatgctgattttgacctgtttttaaagcttattactgaaaggttataatgtaaaaggtactgctgatatataaggtactgcttacctaagcctgaggctggggacatactgcagttatgactaagtttctcatttttaagtaccaaaaaatggacagatttagcttgtcaacactgcgattaaaatttgctgttttttcttgttattaccgctgggtattctctgttgtgttcaataaggaattcttcttatggtactaaatgtctaatattttctacccttctccattctggggataaatcattgctttaatgaaccatttttgtagatatattaatgtctagtctagtttatacttattttaaatgatatttcatttgtttatacaatgtgacattgaactatgagctacctcttctacttctaacttaattttaatttgactttaattctaattatataatttttccagattatgccttggattttgaaaagacatttcttatcaaggttcatctgtccaaaatagttttatgtttctcttatgcttttgacactttacttcccaaatcatttattattgagaaaatagctagtaaaatgtcacaaaaattgtatagattagagactgaaatgtgacaaagtagaaatgatttctttatgaaaatctattcatgctttaatttcttactccatcatggtcctttcagttatgggcactggctctcattagtcaccataagaaactggcaggattttatactctgctttatttccaaatctaaatattgacaattagtgccttacaagcatggtggcatatgaaaatgttgttagacttctcagacctttctcattttatttgcgttctgcatattaccatgccctgcacactgtgagctaactctaccagttagaagagaagatttcttaactgaccttcccctaatcacttgcaggattaaagttttcattccctttgtgacacctactgactgttgtcaggacaagatgtatattagaggccagtaggctaccttctaatgcacctgggtacttctgttattcctgtggtggcctgtgcttacttaatgagaggcagttaagttaatgcccattgtacttcttattatgataatataattaaattatgtatatgttagatacaaatacagaaagaaagcacctataaaagagtttctaggaaaattatgttaaaagctttggaaaaactcaatatcaataaaagtaaggtgctaaaaaaatgctgtaactggatgactactcaataataattgtacattttaaaataactaaaagaacataattgggttgtttctaacacataggataaatgcttgaggtgatagataccccatttatcctgatgtgattattacacattatatgcctgtatcaaaataactcatacgccccacaaatgtatatgcctactgcgtacccccaaaaattaaaaataaattttcagtgaatttgggtgaaggtattttaaaaatctgtctttacttaggttgtctaagatttggtttattttgaaaaaattgactagattatacattttagtgcagtttacacaaaaaagaaaagttggaattcatattcaaacaaaaggccttggccttacagcaagagtttgtttaataaatgtacatttatattttaagggaaagtgtttaatacatgtaccaactttttctttgctcatttgcaacattttagaaaaaccaatccgctactagtccctgtcggtgtaggataagaggacttctgtatatattaccttcatatttttcggtagccctgaccaagtttgggagaatcctgagaaaaaccacaaattattctcaggagaatttgtggaatagacctgtgaattatggtcttgtctgtatatgacttaggtcaaaatttaattgtgagtggaaatttgtgtttagtaacgtgtcattcctatctgttgagcctactaaatgccctctcaaactagagagctatgtgtaaagaatcttatgttcttcttggttcagttgcatacttacggacggtttatagaagtagttaagtagccagactttgtggggttttttgtttgtttttttgagccagggtctcgctctgtcacccaggctggatggctcacactgcagccacaatctccagggatcctcccacctcagcctccaaaatagctgggactacagatgctacaccatgtgtccggctgattttttttttaattttaacttttgtagagatgagatctcactgtgctgccccgtctggtggtaaactcctgggcccaagcagacctcctgcctcggcctcccaaagtgctgggaatacaggcaccatgcccagcagtacctagactttgtagtaagacatacaaggttcaggttccagcgttaccacttattagctgtgtgagttttttacatgttattcacattttccaagtttcaatttcctctcttataaaatgtgcataacaagagtagctacctcataagaatgttatgaagatgaacagtgtatgtcaagtgcttagcaatgtgcttaactcctgaggtcaggagtttaagaccagcctggccaatatgatgaaaccccatctctactaaaaatactaaaaatacaaaaattagctgggtgtggtggtgcacacctgtagtcccagctacttgggaggctgaacataagtagctgtacatgagaacaactatgagcaagaaagttggcttcatatctatagtattttacctgttgtaatgatgagtccaattagattagaaaaataaattataatcaccaccttatattttctttatagtaatcttatatatctatacagttataaaataagaaattgtgtgcatatgatgagcactgaatattacatcatctgtgtatgctcatagacattcaaaacttttaagtgatctttattattaataatgtaataattttgaaaacttttatagaagtatgtgatagatttactaaagtacacttatggacaacaacacgtaagaacaactatgagcaagaaagttggcttcatatatacggtattttacctgttttaatgatgagtccaattagatcaaaaaaattataatcaccaccttatcttttctttatagtaatcttcttatagatgtatagagttataaaataagaaataaagctgggaaggctatttatatttcctctccagtatccaacttaattgtttctctcatcttaatcatttttgttgttatttaggtagcacaataaaacaatttacttggccggctcagtggctcacacctgtaatcccagcaccttatgaggccaagccgggtggattgcctgaggtcaggagttgaccaagaccagcctggccaacatggtgaaaccccagctctactaaaaatacaaaaattagctgggcgtggtggtgcacacctgtagtcccagctacttgggaggctgaggcaggagaatcgcttgaacctggaagacagagattgcagtgagccaagattgtaccactgcactccagcctcggtgacagagtgagactccatctcacaaaaaaaaaaaaaagatttaaaaaccaatttactatcttttatttgctgttttgttaattcctttcctgataggagttagtgttgacaatcactttatctgttagtttactgcatatttacatttcaaggggcatagtctaacctaaactttattataattgagtctgtataataaagagttttattgtggttattactactacacaattatacatatcctttattaagggcaaagtagtttattctgccttgaggctcccctgagaatttaaagctctgattcagtaagtttagtaaacactaaatttagagctgcttgtggtaatatacataccttactgcatcttaccttgatatgcaaagacaccactaaaatccctggataataaacattttgtttttcaggaatccaaaaacaaagcacattaactttattccttcagagttgtgggaaagtgagtttagcagagtttataagagtcaaccagcatcagtgaagattcagggagctgaaactgagaaacatgaggcagatcacaagaccaaaaacactgcatggaaacacaggaaaggcttttcaagaattgtgtctaaatagagtttacctaaaagaaaatagctctaagcaaattactgtggactgtgttgtagtataacaacagaaatataagactgattctccaccacagtttttaagttcacagcacagtttcataaagtaaaatatttaatggcaagaataatgtaattactgttacatcagtatgcaaactaaaacctaatcataataaaatctagactttaaaaattgtcatgtagaaattctgaggctctgctgctgcagatgtaaaataaaagctggtctgggcaaagaaagaggttgggatcacttgttggttgatcatgttggtttctttctgaacaatcccattccactcccagaaaaaaaggggaggataaaacatgtatttcttaccaaatatcacatcgttattactgtttaaaacaattactttggtttttttttttttctacattacaccagttgcttaggttggaatgtaaatttgctttcatcacaagactgatccaaatatccagtattaacggatatttaagtaaacataaccagctttcaagtttgaaagtaatatcatttcatattatcatttaaaggacttgttaaaacacagattgctgtgccccaccctcagagtttctgacacagtcattttagtgtggtgcctgagaacctgcactttgaacaagtttccaggtgatgctggtccataggccacactgtaagactcgccagcctacatgagctccagggttccatcaagatttgaaagctattgaatgcaggagcagaacctcctcaataggattttgagatttttgtctttcataaacactgaaactttctaaagttatttgtttctagccatggaaatatttatgcattggagtgcatacattcagcttaaatctagctttagtgcccaatcttataaaaactttggttttattgttttcctccttaacatttgttgttccaggctttaggtaattctgtttttctctttaccatacagtgttacattagtaaaatgacagaaatcacaagaagatgtatcgatttatttctattgagatttgctgtttagcttccattcctctttacaatattttgcagcactgcttctacctctatcctactactaggatttttttttttcgaatcttaaacaaaataatgtgatgaatagagcaatatattttatttagtttaaaaaccagaggtggcaagagatttatgaaaacccaacaaaagaaagacctctgagccaaatcagcatctactttttaagtatttatagaacaccctcttgctaccatacaaccaagaagagtaaggcaaacagtatctcatgcctttgtgtatttaaggaaagccagaataaaaattcctgcttctacccctaaatcaaagccttctctggcagaatgctagttctgtctctccagctagctctcttttttcatggtttactttccaccagagctttctataccctgtttgtctcaggaattaatcatcttcttatcttccctcttctctgctagccagattataccagggttttagggagattgaaaagcaacttgtcctcttacaaataatagaaatttctgacaaatattctaaggtcagagaaatatgattctttactcagggttagaattactaagtattctctgttgtgatttagtagcaactgcacattccagcaacaagccggaaagctactggccttcacacttaatctttgaaaatgcctcaatagtcattttagtctatgagacaaagactcactttgtttttaatttatccttacagaattgtgttacagtactggcacaatgttcacatatatgcaaatagtagcaggggttttttttgttttttgttttttgagatggatgcttgttctgtctctcaggctggagggcagtggcgcaatctcggctcactgcaacctccgccttctgggttcaagcgattctcctgcctcagtctcccaagcagctgagattacaggtgtgtgccaccacgcctggctaatttttgtatttttagtagagactgggtttcaccatattggccaggctggtctcaaactcatgatcttgtgatccacccgcctctgcctcccacagtgctgggattacaggtgtgtgccaccacgcctggctaatttttgtatttttagtagagactgggtttcaccatattggccaggctggtctcaaactcctgatcttgtgatccacccgcctctgcctcccacagtgctgggattacaggcgtgagccaccgcgcctggccagtagttttttacttcccacgttgattgactaggatcttcttcagcttactatcctgaagtttcgaaaaagaaaaaaaaaaatggaataaccttccataattctttttgttttctttgttaatgcaagatcttttgggtctgccatggagaactcaatttggaattgtcagtaaatgatggctcactgttatatacttgcttccagtccaagtctgtttcttcctcagttctttattatatgtaaaactatgtttgcaaggaatttatgtaattttacctagtcagcatattttcagccattattgacagctaatgcaaaatggaaaacagcaacatgagtgcattgtgtattattctcaaaacactattctgagatgattttcctaaagcccctgccttaaaacagtttataatctagtagagtttgatgattcctacacatagaatgggtagaatttgtactgcaaatttataaaaccagaatcataaatccaacattagcatgattttaaatcatgctaaaccaacttagcatgattttaaatcatagttggtaaaatattcaaaaaggaactggtttctagcattcatacaaacacctcttatccaacatattgtacttttccctgttaaacatacaagagcacttgtactagtatcctgttataatatgtattccacgcaagggagtaactttcacctattaaatagcagttatccttcttgtggggagaggtggggaaagggacagacataactgaggtaagaagcgtgagtaaattacttcttgtaatttttcatccgctctagatgccaaacattctgaccaacttcttataattttgttggtatgtctccatgttcctctattgcctgtcatatcaccacccccactaccatggtcattatatactaataacacctagcattgagcacattatatatgcaaggcactatgctaattttacagaaatatgttcatttaaatcttttaccttgagaggtgagtggcatattattataataattacataggccacttagcttaaagatgtatacagagcatctgttgtgtacatgatcactaaatcatgagtccaagatccatattttagtttctgttccagggtaacttggtctgtggccttgagtaatgcattatacttcagctgtctattaccaaagaaaaataaatactaattattttttagtcttatctatattttaccctataaatttaattatcagaacaactcagattatggctcacattttaaagacaaggaatccaagcttggaaaagttaaataattggttgaagactacatgataggctgtgtagcacaagtcttgcttaaaagcccctccattcagttactgtgttttttactttatcctataatttcttttatcatactccacataaataagagaagataatacatatgtaatatttctatcttgaaagatgctggaaaagatttttttcttccaatttagggggcatactaacaattttgacaacacaagaacatctagcctgttactgtggcgcacacctagcagtttgggaggccgaggcaggaggattgcttgaggccaggagttcgagaccagcctgggcaacatagtgagatccatctctacaaaaaatttaaacattagctgggtgtggtagcatgcgcctgtggtcccagctacttgggaggctgagatgggaggattacttgaacccaagaggtcaagactgcagtgagccatgcttgtgccactgcaccagcctgggcgacagagtgagaccctagctaaaaataaaaagcaaaaaaccccacaaaaacaagtacatcttgcctcataccttacagtcatatcactatctgttatgtactgttgcatagattgaatttgtaaatatgtaagttaaatatgtaaaatctattttgagatatttattgagaaggtgagagttactcaacaaagaaagacagtgctaatattcatcttaataatagtgatgcaactcataaaatgttgatcagtgaatttccttccacttttaggttctcaatattcctttcaaaagccatacatttgaaagagaagtcatcaatcacttttagctttttttttgttgacagtaatactttatataaaatttaaaaataggaaggccatatattacaaaattttaacagagataggatttctggtaaattttatttacaccattttctcttatatattttatttttcctatgatgaaccatgtttatataataccttaaattttaatggagttatttatcatagctactttaaaactcagaagttggtctgacaaacagttagaattgctcgtgtcagtaaagcagtaatcacgtattagccaatatatccaaactttgaaatttggaactcctttttatattgtcaaaaacctagtactctttagatatacggaaatgaaacctaataacgttaaacttattggcagttgagtattgtgtttcagcttagcacgtttaaaaggcttttctgagctcagattattgatttgtatatgcaaaaataataaaataggtaattgaaatttacactgccttattttatctcatacactgagttttgctattcactgctgtaaagagatgtcatttacaacagttgcaggccatagtaatttgcctatttccttataagataaagatttacagataaatgaagatttaaatctcagtttcttcttgaaatgagaatttctttaagttattcaaaatcccattgaagtaatgtctgtaggaatatcctaagttattgtggtcattttttgagtaactgtttctttggatcagtatgttgtctccatatttattgcttctatgttctatctgtatatcaatgtgtctggtatatccttttatgtggcacaacataattgcatgaaaatagaacttatgtagaaggaacatacttattctgagttaccttggatacagcttggaatccccagttttcttaggccttaagttctaaatagatgaaggacatgaacagatcacttatacctctataaatatctacacaaatgtaaactagttaattcattcaacaagtaatagtacttgctctgtgcctggcactattataggcagtactaaggatatagcagtatataaaacagacaaaggctctaccttttgtcagccacagtctgaataataaacatatagaaaatgcaaattaaaataacaatgagaggcttcttcctactatgatgaatttaccagtaacggacttgccttcccaccagaaacaactgttttcagacattggataattgacagcatggtaatgtgatccctgagagaaagggcgtgggttgagggtgacaagaactagatgaatcctggctttctgacacaaggtattctgactgtggagaactctagcagagaatgacagtcttgctgaattgagatcagagattgaggcggcaagggcaaccagaagttacagagtactgaggacagagctaatccgagacaactgcagaactctgcagaggggttcttttgcatctttaatactgagtttcagagatgtgcaatgagactccacgaggctaaagaaagaactgaacaattcctagagtcccaacaggaatgggagatttttattttttattttttattttttttcattctgaccagaaagatcttgttaaaaacctggagcattcagtagagatccaagtaagaacacacattagtagtaaggctaaactagcctcagagtaaaaaattactccatacctgcctaaatagagcttaaaagtaagttcagaaggacaaactgatccacaattgacttacctgctttggagggccaggaaccagctacttggcctgactgttaaaagtaaggcataaagaagatgttgatttcttttgtgttgtatacttcaaatatccctcaatgtgaaagagccaatacacagctaaagtgtcttttcttttcaaatgtgtttcccttgtaattcttctttgttctcagtgtattttgttggatatcttttatagaaaagaatccagtcattaaagctagaaattaaatggttgtagtcattataatgaagatagtttatataatctgtttgtttcatgaaagcctctctgtgtttctcaggtgacaaagatttgttttatccatgagcgctttttaagactcactttgtatagtaaaactcttatttgtaatgtctgtctttgctttgattctctatactattcaattaacaaataatgattaaccagctatcatatgccagatactattctaggcattgtaatataaagcattatatttgatgaaaaaagtctggaaataaataaataaatttaggttgatcttaggtcctgatgatgtatattcagcccatttgaaagaaagagggctaaatttaatacaggatctgctactttattagctctgcatctcatttttatgagtgtccaaggtattatatagagtatagcaaagaatactatctttttataaaacctgttctccatttttcctgggcatatgggtaaactgcatgtaactgcatattccagctttccttgcacttaagtgtgtcacatgactgagcttgaaggaggtatgattggaaacaatgtgttccagttccagacgtttcgcaaagttcagaaactttacatgtgcaatttgtaaaagacccttccccctcccaccccctgcgtctctggatgcagagaatccaacaaagaactctggggctgtaagatactgttggaactacattatagaaagaagcttcctactgaatacgcatattgaatgagaaatctattgtattgggctactgagataaagttgtttgtttcagctcttggcctaccctaatacgaggagaaaacataattgtactgtaactgtagtgatacatctttgtgagaggaccataatttttataaatacataggctgaaattgagcttgagaaacttcagtctttctcaaacagttcattaagatgaaaacattgctttctttcttttgtattagtgctaatagcccttgttctgcttggacggttgttggaagggctactttaggctgtgtacttgcatatcctgtcccttcttgtcaatctgtattcttcttctatcctctgaaatgaaatacgtctcttcaccatcttacctatcttttcctttctctttcttaatgatcagaaacatgtttttaaaagatttttctttctgtgccaggtttggtcatgataaaatccttcacatatttcaaagtgtggtaacacaatttagaaactttgagtgagaacccactctaaagctttcaagaatgacctcatgatttactctcactttaatacagtaactacagcttttctgtattgacataccacacttgtctaagttacgaagctgcattgtaaccatggacatagattcttcacagattacacgtgtgtaccacacacagattcagtctgtgcttcctctttcttcacttttgacctctgactatgccatccgtggaattgaaggctattaaaagtatagagaactggattggcccttctgaaaagatggcaaaaattttttaagaggagactgctctgattatctatctcatcaaatgactagattgctcaaataattatgtctgttcatatgagaagtctttttttaacttattactttctctgtttatacttgttatctcccaattctcttattacctaaccagtattccagtcatgactgtaatgccacttgtgtccttcatactgaacaccaacttaaatgcacttgcctaaatgttttgcttataactcaacacaaactagacagaaaatggagaattaagtcaagttgctctattgaaatagagtttggccgggtgcagtggctcactcctgtattcccagcactatgggaggcagaagtgggtggttgcttgagctcaggaattccagaccatcctggccaacatgacaaaacctcatctctactaaaaatacaaaaaaattaatcgggcttggtggcacaggcctgtagtcccagctacttgtttgatcctgacaggtggaggttacagtgagccaaaatcataccactgcattctagcctgggcaacaagagcgagactgtgtatgatgaaatagagtttggccactgggcgtggtggttcatgcctataatcccagcactttgggaggctgaggagtattgcttgaagcaaggagtttgagatcagcctgggcaacatagtgagaccctgtctgtacaaaacatttttataaattagctgggtgtggtggcatgcgcctgtaacgccagctactcaggaggcagaggtaggaggatcacttgatcccaggaggtcaaggctgcagcgagctgtgatcacactactgcacttcagccagggtgacagagcaagaccctatctcaagaaagaaagaaatacatgttggtacctgcactgtttcttaatttcattcatttggtataggattttcatgatttttgccccacctgattataactactttttgtttaacctaatattttcttggaatttcatgcttttgtttaaataatttacttttaaagaaactttatactactagtcaaactagaaaatcaatatcatgaacataactagaagattaactagaacattaatctggctacttaaaccttcaaatgattctgaagctcaactctctctgttaaaaaggaggattagctgatactagccgcacattaaaattttcttcttgacagattcagaaggattgacagataattgaaaagagtaacttttgtagcaatttcattagtcagaataggctaaactatattgccataacaaaccatctttaaaatggcagcagattcatacaacaaatgttggtttctaattcacccaacaaatgttggcaactctccagggcagctgtcctttattgctgcttcaatcttgtagtttcactatctcaacgtgagactttcatcatgatttttctgtcagaggaagagatacactgtagaatcatgcagggactatgtcacttctgcttttatttcattggctcaaactagtcttctaaactgcacaacagctggtaattgtagtcacccctctgcctagaagggaatggagaccaggatattggtgggcactagtaatgcccactgcgctatgtaattcagtgctatttactgccgtttttatggatgattttaaatcatcttttacatcctaaaatcagtcccataccttgagaaacagttttttgttttgtttttgagacagagtgtcgctttgttgcccaggctgtgtgtagaggcaccatcttggctcattgcatcctctgcttcccaggttctagcaattctgctgctgcagcctcccgagtagctgggactacaggccctcaccaccactacacctggctaatttttgtagttttagtagagatggggtttcgccatgttggccaggctggtcttgaactcctgacctcaagtgattcacctgccttggcctcccaaagtgctgggattacaggcgcaagccaccatgcctgcccaggaagagtattataaatgaaatattataatatttgaaatcaaaatatcaggatatgaatctgtgatctaccacttaattactgtaatcttggacaagagatcttatgattctgttttcccatctgcaaaacaggattaatgtattttacatagaaaaattacaaaggtcgaatgagcttaggtaaaaatttaaataaaagtataaaataggctgggtgtggtggctcatgcctgtaatcccagcactttgggaggccagtgtttgcggatcacttgaggtcaggagttcaagaccagcctggccaacatgctaaaaccccgtttctactaaaaaaaaaaaaaaaaaaaaaaaaaaaaaaaaaaaaaattagcccggcatggtggtgcacagctgtaatcccagctactccagaggctgaggtgggagaattgcatgaacccagaaggtgaggttgcagtgagcctagattgtgccactgcacttcagcctgggtgacagagcgagactctgtctcaagaaaaaaaaaaaagtatttttatttgtcgttacatagctttttttgaaagtgaggtaattgtttttagagctgtgtacctcacattagaactgggctctagcaagaagttttgcatcactaactaaaagaaataggccatctataagacccaacagaatgatcccatttcatcagtctttctaaaacaaaatttagggatgttttctcttccatttaaatactcattttaaaaaaaattgttacatttaattcttatttgagtgccaaataagatcagagcaaaattaaaagtttgtataaagctctataagaaaactaccgtctatagatgtaatgttggaaaaagtttttaaacttttttacttgataaacattaaaatggtatcattaatttttaaaacaaggcaaagtgtgatgatatttattttaattgattgaactaagttagaacaaactaaattcataagccagacattgctacagatttcttatacactgttggtataaagtctagccacatatatctgaagtaacttgattttctaagtcacttgctcctgtcccaacttctttcttaattttctggtggagtttgtaaaggagtgctattatttcttcttaaggcagttgttaggattcaccagtggtgacaactgagactgggcttttttgtggtaagatgtttaattactaattcagtttatttacttgttataaatctattcagatttttccatgtcttaatgaatgagttttgataatttgtgtctttctgtgaatttgcccatttcatctaagttatcaaatttgttggcttaaagttgttattaatatgcccttatagtcctttacgtttctgcagagtcaatagtgatggccccatttttattcctaatttgatagttcatgttttgctgtttctctttgtcagtctagagtaagttttttctattttgtttatcttttcaaagaattaaattctcgtttcatcattttcctctgaaaagcaaataagtttatttgctgtttcattgagttctgctttaatctttatggttttatttttctgcctgatttggggtttaatttgtgctttccaaatttttaaagacataagctgtgagcatgtttttctccagttatttttcaattgttgtaaccataaaattttcatgaaactttaaaaaaagataaattagtgaaattaatgggtcttctgaaacgagtttcttaaaatcaccttataattccaattgttaatagaaaattaacatatattaaactccgatgagttggggggcatctgcaatacatttttctctttaaattgtgtagcctatgttttgtcccattttcatggcacttggctttctcctgtttgtatcatagctgttcttcttctgtcttaccccctcattaagttcctttaggctggacactgtcttaattatgtttgaatcccctgaagcatttcttactgctctgtgcacatggtaggaacacagaagcattcattgaattgaagggaacagctcatatgttttatggaattggtttacaaatagttattgcaggtttctaacaaaataattttcatttaaactgtcattatttgtatgtgaaaatttcatgtagcaccaaatttgcatttttaacacatctgagttttcatgtttgtgaagtatcccaatactctcagatgattatgctaatccttaaaaagttatcatgatgcctcttttcttatttattacatagtaacatttctagtagagagtggggcctttgttatgtcacattttttatgaaatgtttaaagaaggagataaagatgaaaaattaaataggaatgtcataattattctagagcttttagcaatatttgcctgtgtataaaattatcaatttatatttcacagctataacttctgaacaagaaatgactaaatacagaaaagcatttagctctgatatcacaacctctttattttaatcagtagaaaactttattaatatatttgttataatacatgttttgaaattgttacctgcaggtaaatatgctagtataccttctcaaattccattatttttgctatttctttgtaacaatttgctgtgtcactattagtatatagttatttcatcccttattgaattatttatagattttaaatgatgacatttcagttatttggctctggttactttagagtttttgttttattttcattattaggagttagtataaaagtctttaggtgataagtactttctttaaaagaatttaatattcacattttgctgggtacaggggctctcacctgtaatcctggcactttgggaggctgaggcaggaggattgcctgagtccaggagtttgaaaccagcctgaacaacatagtgagaccctgtctttaaaaaaaagaaaaaattctagaatttaatattcaaatgctaaattttcaatagactcaaagtcagaatattttctccacacttagctctgtattctttatggtatatattctagtggggcctgtgtttatattgagaccatatgctacgagttgttgctgactaggtagatttcaatattttttaaatggatataattgctgtgttaatcttaaaaatggtgaaactatgtaatgttgcctttttgcttagatgaaatgaatcgttttttcatttctacagttgttcactatgataaatagggataggaaaggttcatatgagagtccatagtagataactagtggccacatactaattgatatttgtattggtaaacaaagtcatctttattttgccacactgcatacatgttatatttcctttatatttgtataaatcacagagaaatcagatatctaatagtctgttttcagaaatgtatacatatactatatctctagctacaataatatacattcacatttaaataaatgtgttccaattatttgacacttcagcataaattggatgtaaaactacacacaacagtttttatatgaaatttggagtatgtcgagtagggaactaaaaggcataacacgtagtattggggaagatagagggagatgagaggtttataaaacatgtacttcatttttttatacttacatagaagaaataactagaaagatactttgcagctgtgtattaatttataattggtttcagagaagtatagttttatttgcattatgaagagtcagaaattgtttctacaatagactaggctttatttgataaagattatcatatcaaattttcattttctttttctgcattgtatcttttttatttttgtttttttcttttctttagatagttactttctcagaattaacagggaatatgaattatcatttttttcctcttcaccatttttcacttttatctaccctgtgccaaaatgtcagattctactggtttttccttctctctgtttttttttgtgtgtgctttattttatttttatttattgttcttgatccccccaccattttgcaggaaatgaataattaaaagggaaaatctccttgcatttctgctttcttcaggatgttgcttatgtcaccgttgaagcacaatcatgagaaatagttaatcagcacattagatagggtaggaggatgcccttcccacctatttccagattttaaacctaacagagatccagggttaataagaaggaaacaaagaatgacacaaacactatctctccttctacccttctttcccactcccactacagaaaattcatgatattcaaaggtttattttctagtaaatgtttaggaactaaaatgttataagattctgcatatgaaagctttgttaaaactttttaaaatatagttttctctttccagataaatttctcaatgtttctctctacttctttacaattctatagttcaaatcttttctttctatgttgcttcaaagagttttacaattttagctcttatttttaggtctttgatccattttgagttaattttttatatgacgtaagataaggatctaacctcactcttttgcatattcagtttcctcaaaaccatttgttgaaaagactgtccttttcccactaaatggtattaatacccttgtcaaaaattattgatgatacggtttatttctggccagccttttctattccattggtctatatgtctgtctttatgccagtaccatactgtttagactactatagctttgtagtaagttttgaaatcagaaagtgtgagaaatccaagtttattatttttttcaagattgttttgactatttaggttcccttgagatttcacatgaattttaagatggatgtttctatttctggggaaaaaaaaagtcattgaaagtcgttgggattttgatagggattgcattgaatctatagatcacttgggtggtgtaccatcttaatattgtcccccagtccatgaagaatggatgccttttcatttatttgtaccttctttaatttctttcagcaatgtttgatagtttttggtgcacaagtcctttgtttccttgattaagtttatgtctacatattttatttttttgttgttgctattttaaattgaactgtctccttaggttttttttctcagattgttcattgttagtgtatagaaatacaactaacttgtgagttgattatgtatcctgcaactttaccgaatttattagttccagcaggtatttttctggagtctttagggttttctacatataagttgtcttctgcaaacagataattttacttctttctactttggatgccttgtatttctttttcttgcctgcacaaacatttttattttcctaccacactggacaattaatgtttattaagttatcttcaggttaactttactaaatatactttataatctcaaatccaactttgtgaaaatactttcttggtacttttattgttctgcctatctttatatttatctttcattttacattttcttgatctttgctttcatttggtctgcctccatactgttctctctgtatattcttatctgagtcttctgccagtttcctcctaaaaaatcccttctgctatgaaacatttactaaagacaatacctcagtaattatttattattttaatgcccttatatttctttgactagatatacttcaacattatctacagcattccagcatacagaggaacctcgataggtagattttctcttttcaccattagcattcctgtgtgatgaatctgattgctcttatcctccctcaaccacctgcctcccaggtgatcatgggaagaattagtgagtatagatagtattgttatttcttcaaaatagaccccatatggttaatactttataacttaggactctttaaaaaacagcaacaacaacaacaacaacaacaacacaagagttaaatcggtaaaagaatgactgaaaagaaattctaatagccaggcgtgggtggctcatgcctgtaatcccagcactttgggagcctgaggcaggcaaatcttttgagtccaaggagttccagaccagcctgggcaacatggcaaaactctgtctctaccaaaaaaaaaagaaataacgaaaattacccaagcgtggtggcacatgactgtggtcccgactactcggaaggctgagatgggagaatcacttgagcctgagaggaggaggttgcaggttgcagtgacctgagatcacaccactgcactctcgcctgggcaacagagccagaccctgtctcacaaaaaaaaagaaaaaagaaaagaaattctaactttaccacacatgttgatactctcacagatgaggccttgatttgtatttcattacagcttttttcttaagaaaattttcttaatgagcagtttgcatgtggtgttcgtggattctctaatccagtgttcacaaacttcagtgtgccatacgatcacctgcagggcttgctgaatacagattgctgggcccccaccttccagagtgtctgacccagcttatctggggtgaggcctgatcatttgcatttctgacaaattcccaggtgatattatactgctggtccaggcaccacattttgtgaacccatggtctaaagaatactgtttaacttccattctgtaccacatatttattgttgtctaacttagaccattttgatttggatactctactaaggcataacatattgtattttcttcaacatgattcccttctcaattaaaaaataattggtgatatcactgttcacatccccttagacatctttgttttactacccccatgcctcaacatatatgcacggttcagacttccaaatcatgctgaatctgtgatgacaacagcaaaaacaataataacagctgatgtttttagaacatttattctgggctaggtactgttttgaggattttatttgaattaatataatcctcacaaattgtctttgatattattagcccaaaataactgatgaaaggaaacaaacacagaaaggttcttacagctagaaaaaaaatgaatgaaataggactctaatgtaagcattctggtttcagagcccttacccttaattcctgcactctcaaattcctcactaatgtgctgccatgttatgctgtctctatagtatgtctgaaactactttcttactttgttttctgtagccgtagccctcactagtccatgtattaataaacttaataagtgagctatatcactgtatccaagcactgtgcttaaatacttatacatgtttggaattagttaagcctcataacaatactgtgactttatgaggaaactgaggcttggtaaggctaaataacttgcctaatttcttactattaatatatgctagaatcaagacctagatttttcagatcactctacttaacctctaagccgatatgcattcatctgctcaacctctgccagattctgtaactcaagtcattgagggcataagaatcgatgttcccagtgtcagttccaatcacttatttgtgcagtagtttctgttatctcttacatcacaataaaatgccaagtttgggctttagattgttcctacccatctcatctcaaccactttctttcttcttttaactatcagagaaggccttttaatgtggaattctcttactcacatgaatcatcttatgtaccattttttacaatgaagcatattaaaattccaggcttccaggtaaaacattatgccccatcttccaacttgcccttctatgttctccaccaagcaatattatgactattgttcaacttatcatatctgtgattgtccctgctgtgtttgacttacaaatgacactagttttctgtgacttggatgagaacaccattatcatctaccttataaaacagtttaactttattattagacaagcacagtaccccatggatgagggaagaggtgaagagtagatagaagaaagaattaaatgtctcctgtgagctataaagataacctcagttggaatttcctgagaagggaaaataaagaagttggtatacatcgagcttcatagatctaaaataactctctttgctggagaattgtgtattttagtaagaggttttattttttttcctctgccagatctgtttaacttctgattaacaccatatagtccatactctcttcacagtcttcagctatttccttttttctgtatgatctctagaaccctgatcttttcccttgacttcatctcataattcttgtacacgcctcatacctcccttaagttctcctgccatccttcactttttttcttacatttctaccttaagtttctggtctgtctactagccctaaatttcattatttaaaaaatgtttttaagattttaagatatatagagtcccttgagcagggacctgtgctgtctttgtcagaactcagcaggtaaaacagttactctgatgccatgacaatgctttaataaaattctagtaaaggacttaagagccttaaggattaaattactatataatcatttttcctatactaagcagtattgaataaataaactgtttcattatttttaaatctgttggtgaaattataatgaaagagattctaatattggctattagtagcctgcatatatacatataaatcacttgagatctttatttgtaataatgatttttaaaaacaggctcaagtctcacactcatagcaaaggtgagagttctgctattccaaagcttgcttttgacagaaccatactgttaggactcttaatgttaggcctttgttgccatggagacagtaacaggctttattattttttaacatatactgaaaatatacataccctaaggtataaagcgtgacttagttgtctgttggttttgagtattgacacattttgaaaatagtttctatatacttttaatacttgatttttatccttcaaagaaaatgaaggagatttctgaccattgtgataacagagttgtatattactttttacagggtcttttaggaataacgtagaatctcttgtgggtcagtaatggatgaggactttgaagaacatgcagaaacttttgagaaaagtaatgtgatcttagacacatgtcttggccacctatgattatgacactaatatataatacaaacaaatcaatttcagattcaactaatactttgtgccagtactgtgctaagcactgtcaccctattatagtttatttaatagaactcagtttgaaagcacctaagcaatcctcatattttaacttttacaataactgattattcgaatgtgtatcaatagcattcctgaatttttcctcctaaaaattagtaaataaaatgtgtacatactttcaataagtaaaactttcaattcatgagttatactttattccttacaagaatgaatggattccatggcatgagatattaatattccataggcatcatgattaaattggtaactaaatcacatgtctttagcttctagtgtcaaactagcagggcctagttaatgctttagtccaccagcagttttgacttcttacattaatagctgagaagtaaggtaattgattttcttgttaagctacgtagattaggcctgatggcttatatttaatcctacttatggtgtttatcatgaccaagtattagagtagttatttctggataacaaaaaccttttgattacagttattataaacaaaaccttgaaacatagtcctgtgctttccttagttaacatctgtatttaatggcaaaagaagccaaagtaagaaagctctttgctttataaagagagagaaataaggtaacagacaatcacaatttatactaatagttttgaatattagattttagcttttccagttttcagtgacttttaacaagacccatctcctctatgaagaatgcagttagttttttttttttttttctggctcaaaaaatagggtaacctgatctgagtctgacagagtgtgtcgttcatttaagtgcttccatctgttgcctgctgttccccttactcatgacccctctatgtttctctctttccctttttccttctctttccctgtttctctcccttcctttctctttctttctctcttgctctctctgtctcttgcttgctctctctctctttttgttcttagcccctctgaggaaggcaaagtttgttgagagcccacgaattccagaatccgagcttggctcaccaaccctcacttcagctcagaaactggacgtggatgcatactgccctggtaagcatgcatgcaaagtgtctgctttgaaagagggaggattggatcaggcccatccagcagagcagtgttttgcatgtatactactcataaaaacatgttacctcttttgcaactgattgcctattcttcttaatagaacatagtttttactgaatgccctgttttgactttgatacaataatgagagtaagtattgaaaataatttcaaaggtaattttcaaaagaattaaaataattttggtagataagtagttttaggtaagtagggttacttttgtgatttgagatacttaaagaaattttgctgtggccatgtgcaaacagaaatgttgaagatgtgaataagaatattcattcaacactagacacaaaagtgttctatgcaacacttttgcatacaacctttatgcctaattcctgttggatttctggtgattatagaaaatacttgtgatgctggaaacattaaacttgaattagaaaagaaatataggtttccgagatggactccttttggatacagatacttacttttagaaatacctcttgtgaatggcctgtaaacacatgtgagagttcactaaaacccttcttgtgtgggagccaaactgagaaagactcattatcaatgcttagattctttcaaacttagatgagttgcctggcaacatcctttacactctctctacagtcagtctatagagctgtgtcagaaatgttcacagctctagctgagtatacagattagagcattagtaaaggaaggaccttggaagacttggttttaggtcttttgtttattcctgctcattaaaattgatgttaaaccacagtgaatacaactactacatatttacagcatgaggggtcagcagagtaaaatgattcctagttctggggaagatatcagtatctgtgatctgaaatgtcagtataatataccttcgaagccagataggacatagtaaaacaaaaaacaaaacagtaggagaaaatttgggccaaacctcataaaatgagagacgtttcattttatgagtcaattttgaatactgaaagaccttggggattttgctttccttcggggtattgaaacggcttcatccactcttatagataaccattcttttctaaatcaatcacagttttgtattaggaaccagcttttctgttttcaaaaggaacaaagtagttctttaaatggtactatagcacacgattagaagaatctttcatgttttgaggtattgtcacgcttcttgggcagtcgaatattgtactttgcatttcttcatgcaaattttagtgttataaagtaaaataagtgtgctaattttctatccctttcttgagttttagaaggaaaaccctatcagaggccttttccagatttgcaagtcagaatgactgtcatgggggcctaatctttcacttcctgattgcccatctgacatctttaatctaatctaaagctaaagtcttactcaggtgattatttatgtatattttccacaggcatgaattctttgttgaattagaattaaactaaagctcggttatgatttttagaaagcaaggaagaaactaaaacacaatatcaaagtgctgctaaaaaagtctttccttttcttatctgaaacaattttaaagcatagaaactttatagtgatttgctcatctctaatcaagttattagatgctctgaaaattagtttctaccaagataagaatggtaacctgagggttgaagctattatctctacatagtatcaaaaattaacaataaccaaatgaattgatgagtatactcacaaaccaaaaagattttgcattttttcatgcaaattttagtattataaagtgaaataatacttaatttttgaatttctttcacataggatatactaacaccactgatgatattttattgtacattcatacagagtaatacagttaaggctactagtgttctgataccttcttgtctgcctgctttattcattatcacctgaaaatttaggaaaatactttgtctcccagaggcaacaatcacaaactgaaggttagagcagtggttttcaaactttaacttacttcagaattacctggaagatttgtccaaatgcagattggtgggcccccagaatttcttactcagtaggtctggagtgggtcaagaatttgcatttctaacaaaatctcagatcatactgaagctgctgtttgagattctatgctttgagaaccaattgggttacagggctgctgcaggctactcactgtacagtcattgttcagtggttcagtgaacaatgctgaaagtctttggggttccttctaccactattgatatctggggagtaactgccagtgttgtttctgtgttatctaaacttaaaccttttggtagcttttgtgtctgagaaatagacttatatatttttcttggtatgtctttttgtacctgacatctgtgtacccacgtctaacttttctgtgttgtcctgcatgtaaaaggaaattgtggatcaaaccaaaccaattcactgatggttaagtccaaaagtgtagggaaagctactctggagtatagctgttgagctggaatattaaattgagtgattcattatatagcattatcttctataatatctaattaaaggtttactgttcctcaagttacatttgttgtatgcaaaaaatgtgggaaaaatacaagcaaacagtatgttttggttctgcagctacaactgtggagataatcgatggtgttaagtaaactaccagaataaaggggatgttccgggaattgtgtgtgttaattgtctcacagtggggaaactaagatctagagaattcaagtgatttgtctagggtcacaagcaggatttgttgttcagctcttgaagtggacacaatatagtccaaaaatatattgccctctaatcctgtcactgtgtaaattccatgagcattccttactgtccttagatttaaaagcagaaaattcagttaagtatgagatagtcatattctatttttatgaaaaagggtaaccaactgttagtgatttcaataaagcaatttccaaaataagaaaatagattcatcctacactctatcacttttctatctacagtattacttattaggtgtgtgatttggggcaagtcacttaacctttctacctgtttcttcatctgtaaaaatagagatgataattttaaatcagtttaatatatataaagcacttagaagaatgcttggctcatagtcagtgctcataattgttagttgattttattatttttgcagtgatgatcctaaggtataagacaaggtcttaatcagaaaaaatacttaaaggtttagggtcattttttgttaagtgtgtcctgttgcatttcaattctgatttttctctgatgaatcttatggtctggaacatgtcacttaacttttccattccacagtctcctgtcacagcaacattatttctataatttaacaaattatgcttttatatagatacatgaatatatattcataggaaaaaatttctggaagaatacaccaaaccgtaccactggttgcctaaggaggggagactttgaattattggaaagttagagtaggattgttgtgagataatattagttagcagagattatatctggttggtggcattacaggtggttttaattttctttcttgggcagcatgtattagtgaataagagcttatgttctggagttagatctaggtttaatttttttctcttccacctactagctgtgtgactgataaaaatagacctatctttaaaaaaaacaaaaacaaaaacaaaacaacctatcatctcataggattgttacagagattaagtgaaatataatgtatatgccacatgcttagctcaggcaaaataaacaagacattagcaccctttctgttactcatcatcatcatcatcattatacttttctgcattttctaaaatttctacaatgaacttctgttgaaaattttcagtaatctgatgacactaaatgatggtgatactctgtttttattttagttttttaagtgtttctgtttcacattataatataaaatttcaagtatagaagtgacctttgacacagataatggtaggccaagttgacagttttataggacttttgactatatgtgcatgaaaggttaagggccaaagcccacaccagtcttgaaataggcaggcttttatcaacaccaaatatattcagaggaatttgagattaatctttttatatggattcttttaaatctcttaaaaaacggtagtgtctttcaaaggacagtgttatttaaggtgacagcaaaattagcatatatttaaaactcaaagagaaaacagtttgattacagttagtgcatattcatatttgtgtatattctgcacctgtaaaaatttttttcatttggattttttatctgtattgtacattctatagcataagcacaagccattgtaaacaaagtgttttatttaaagtgagtagttccttgaactgtcttttcccaactcctgtatagtcatggtcatttccattaaaatcaaaggatgatatttttttcattttctttcttccatttaaaaaatttccgagaacattataaaatgttatctttatcctaaataattaaccatgcttctttggttttgctacaaactatgtgcttgtacataaaatcttctgtatgattttgcattgtcctatgagtaccaagagccttttcctcctgtttcatatcttttgttatattgtgtttgtattctgctttattgtaaatacaataagtatgaaacagaatttttaacctgagtaaaattgatgagctttggggggagtcttagccctttaaaatgataagtaaaaacttgctacatgtacatatgtactttttccaatcacaggttctcaaaacagttggtaacctcccttgcaccaaataaaaagaaagaagaaatgctattgtaaaggttgaaatggaaaaaaaaaaagcacctgttaattattagaacaacaagaacaaaaagctagaagttgtatagtggatagacttgagaggagaatgaaaaaggaaataatagaactatgggattggcctatcaggatatgaagtctaaagtagagattaggagacaaatgaaacagaaataagttgtgtattagaagtatgagatactgccttattactggttatggaaataagcataagaactagaatatgaatataaatggcttttcttccccaaactttcctatccatgtaagttcttttttttttctctctctctctttaaatagagatgagatctccctatgttgcctaggcatactgcaaccaccaactcctgggctcaagcaaccttctgcctcagccccctgagtagctgggactacagactcatgccaccacacctgtttaatttttatttttgtagagacagggtctcacaattttgtgtaggctggttttgaactcctggcctcaagtgattctcccacctgggcctccctcagcacttttgctgagattataggcgtgagccaccatgcccaccctactttgaacatttttagttgttttcctgatctttagtttttcattgtttgtgatgtgagttttaatcttctgtagctaatgaaattttaggaaggggatcggggacaattgtgttcctctttggtgggtccagtttctaggcagataagggaacttcagagaacagcctcatcctatgctttgggagaggcagaagattgagacaggaagtgggaggggaggccagaaagcccttgaggttgcttctttagttcagcatgtcaagagaccatattttggggtatgattttctgtgccccagcatttagaaggttaataatctcatcacactaacttttagataacttttctaaggtgttttacatcacaaaatctgaaggcttggcctctgaatgtggtgtttagatctgtaatttagttagatatccaaaggggcaatattttcattaactgtaaaaccattttaacttccagcttttgaagaagtaaaatgttctggtttagagtaaaatgccagtggtttagagccagactgcctgtgttcatataccagttctgctacttactacttgtgtgactttgggcaaattacttaaccatgatttgttaatttcctaatttccctctgtaaaatggggatgataatattacctatatcacaggaaggttgtaaagatacgacatattaaaatatgtaaaataaaaatataaacatacataaatacataaaatatgtaaaataaaaatataaaatatatttatttatttttgagacagagtcatactgtgccacccaggctggagtgcggtggcagggtctgggctcactgcagcctccacctccagggctcgagcaatcctcccacctcagccttccaaagtgatgggattacaggagtgactaccacacctggcctcataatgttttatgttgactttttactgccttttatctaaggatattgtaggtaaagttatatctttttttcaatgaatgcttcacaaaaagaataaaatttcatgtatactgtagttattgggcatctttacatgcagtctatatataaatactaagttgtgttgtgtgtatgcgtgtttatttttaatggggtcagtttttcatagtggtgtctagttcaggcttgggaacagagaagcttgagttcagttctggctgtgctactttattagctggtgacttttatttaatatctctaatctactctggttccttgtctataaaatgaagatagtaatatcactcactccataaggtgtttgtgatagttaaataagctagtacctataatttacttagcacaatgcctggaacatcagttattgctaacaacatatttctcacatgtatatactattacacatttacttcttggaaaaaaatgtgtttcttaagcagaacatatgttcctgcagcgcagtgttcaggaagaattctgtgggagcaaagaagggacagaaaggtactcttcacttgggttttgacacgcaagaagctggaattctgtatctgatgtttccactgccatcctttacctctaagtcacttaaaatcctcttagtctttttgttttttcttatctagaatttataaattatcacatttaaatttgtaagacttgcaggaagtgttggttaaattctgtttattgagtgttcttcagagtaggtatttgtattagttatctattgttgcataacaaattaccataaaatgtaatagcttaaaacagcatttgttatctcattttctatgtgtcaggaatccaaatgcagcatagcagggttctgtggctctcacaggttgcaatcaaggtgacagctgaggctgtagtcatcttgaagctcaactagggaaggatcttcttttgtgtttatacacatagttattagaaggattcagatcttcatgggctgttgaactgagggcttctattcctcactggttttcacccaaaggccaccctcagttccttgctatgtgggcgtctccgtagggcagcacacaacatggcaccttgtttcatgagagcaagcaagcaagaggtagaaagggtaccagcaagacagtgacagtttttataacctaatcatggaagtgacattctatcactttttgccatattctcttcattagaagccagccagtaggtccaactcacactcaagacactcaagtggagggaattacaaaaggtcatgattacagaagggacggggattattgggacccattgaagaagttatgatcttagttctcttggtttaaaataaacttaagtgtctagtttctattggaaacataagtactgtcaggaagttttctgaagaatgttttcactgtcttttgaaaatatttttagctcttatttaaaaagttatccgtattatataaaatatcaactaagctaaaataagaaaatatacataatccatgaccccactaatcagaaagccattgttaatattttggaatatagcctagcaatctttttacatacagttggccttccatatccacaggttctacagccataggttcaaccaaccacagatttaaaaaattcacacacaaaaataataatacaagagtaaaaactaatacaaacaatatggtataatagctatttacatagcatttacattgcatatggtattgtaagtaacctagaaatgatttgaaatatacgggaggatatacgtaggatatatgcaaatactacgtcattttgtatacaaggagcttgaggatccacagattttggtatgggattgggaggggggtcctgaaatcagtctgttgcagatactgagaaaaggctgtattttattcatctgctcaagctgccataacaaaataccatagattgggtggcttaaacaacaaactactgttcatatagttctggaggctagaagttcaagatcaaggttctggctgattcagtttttggtgagggcatttttcctggcttgcagataactgccttctcactgtgtcctcacatgcttttcctctgtgcatgcatgtcaggagagggagggagaatgagagcagagaggtttctcttcttatagggacactaatcctatttggatcagggctgcacacttataacctcatttaacattaattactttctccaaatacagccacactgggaattagggtttctacaaataaatttgggggagacacaaacattcagtccataatacgtacttttaaagtaaaggcgatagactgggcacagtggctcatgcctgtaatcccattgctttgggaagctgaggtaggagcattgcttgaggccaggagttcaaggctagtcttggcaacatagtgagaccccatcgctacacaaaattaaaaaatagtttaaaaaacttaaggtgatattgtatatatcatgttttgaaattgactttttaaaattacgttgtatgtgtttttaccttaacaactattccatcattttttctcctggtagggcatttcattatataaatgtaacataatttttaaaaaacaatatactgttgctgaacatttaaattgttttaatttcttgttgttataaaggtgcttcagtgaacatactaattgctgaatgattgttcatatctaccgttatttccttagaatgaattccttgaaatggaattgatagaaatccaggattattcaaaatcttaaatctttatattactagatttccctctggtacatttcttccagaaatgtatcaaaatattttcctcagaactttcaccaatactacatatttttgatgagtattgcttttggcttttttaaaatttatgtgtgtttgtctcttcacatgtccttcagaagccttttgtatcactttaaccccccatggtcatcctcaaatatttttggcttttatagtctgtcttatatagaaaagcattgtgtatttgattttgttcacatgttaactgtgtctccttacccagatgtattatgactgaaaaggatgtagaggagtggtaaggcttgccaaacgaaaaaggatggataggcttgctcgctacctgaaagtgcagttgaagcctcatcctttaatgagttttctcaaaacccaaaagttttcttcataaccattgtgaaataaaatgtataccagcctgggcaacatggcaaaaccccatttctactaaaaatacaaaaaaatagctaggtgtggtggtgtgcacctgtggtcccagctacttggggggttgaggtgggaggatcgcttgaacccaggagacagaagttgcagtgagccgatatcaagccactgcactccagcctgggtgacagagtgagaccatgtctaaaataaaataaaataggtagattccatatactctgaacagctttgtgtttttccatttgttgcagtcactttcttccctctgcattgctaaatctaatgcttgtttccagttctcattttatttaacttacctgcaacacttaacacagttactgactccctcttccccaaagcacttattctgtgactccaagttatcaccttattcttgttttcttcctaattctcgggcatcattttcatagtgtattttgctacttccttttcttctcccacttctaaaagttggaatactctaagacctggaccatagatatcttctctgtgctcactttgttggtattctcattcaggcccacatcttttaaggacatgtatatattgatgactctgctgtcatcaccagatttactttgatgacctctaagaccctgctcaagtgtacatccaccgattagtagtaggtgctcatgctgtcccagttgttaaatatttttaatactagccctaccctgttcccttgccttttttaagatctttgctaaaatgtcaccttttcattgagactttgcattgacactattaaaattgcaacctgcaggttactgacaatcttgacaagccactttggtagaatcttgatggcagaaatttgattgcaggctgggcgcggtggctcatgcttgtaattgcagcactttgggaggccaagacgggaggatcattcgaggccgggagttggagaccagtgtgggcaatatagcaagacctcaactctacaaaataaaaataaaaagccaggcatggtggcatgtgcctgtagttccagctacttggaaggctgaggcaggaggatcacttgaacccaggagtttgaggctgcagtgaagtatgattgtgtcactgcattacagcctgggtgaagaacaagaccctgtctggaaaaaaaaaaaacaaaactgagggtttaaaagtgagtgggaaagagaaattgtaatcaatgagtataaactgctctttcaaagaattctgtgatgaaagggaacagagcagtagggaagtagctgtaggagactatgagacaagcaaggattttctaaactagaataaatttcagtttattttaaataaactagaatgctgtgctctggtagagagaggaaattgatgatgcagaagaaagataggaaatgctgaaataacacacttgagtagatgacaaatgagataaaaagcaaaaatgaaggggttgactatggaaaggagtgaactaactagaaaaaaggttatcttatgggaacagatgcagcaggtaagtaggtagatatggtgacgtgagctggtagaaagcctcttctgattgtttttattttctaaattaaatggagagtgatgtaaccagctgaaagtgaggatgaggaaagaaatattgagatttgaagaaagagaagaagccatggaatgtgttccgagagtgaatggattagggaaatgtagtaggattgctgggcagtactaatgtcccacttaacgttagtggtcattaatttaacgagggacttgttagcagacacgtttaactgtactggaactgtatactggagttacacattaggtgaagaattggaccttaaccagggttggggtttggccagattggaatgagaagattaaagaggatcaagggagttgagggtatttgcaaaggagtgattatggtgatgactgtgaaatctaagccaagcaggagaggaaatgagaacatgaggggtgaaggacagtgaacttttgtagattcagtgggttttaggtaccaataggctcaaagaaatgagctagaaatatcaagtggttgtcagaggcatttaagattaaggttatggacagtttgtagtcattagtaatgacagtgttaagaatataactatgggagtgggtgactgaaagaggattggggaatgagatcaccggaggggaggaagtcaacaaactgaggccagaagatcatctgtgtgaatagaaaaattgttattgtaatactgttggagagtatgagagtaaaccaatagctataatcttcaaagaatgagtggtctgacctgaagtctagggaaactacaagaaggaaggacagttattggtacaatttgatgatgtaggattttaagctggagtgttacggaagaaagtaacttactatatactattatacatctctaatctttaccactaccttttattctgatattttccttctttgaaaggaaatatttaatatttgtttaatatttaatatttgttgacgactatagtagtaggcattggtctgaacacaagggatgcagtgatgaaaatgctgaatagaatcctgtattcatagacctcgtagtttagcgtagctcatttagcacaaaccaaatctcagttccctggatcctagtttaggaaatcctattctaaggatatctgtcttaaatcagtaaatatagtccaagatagtaactgggtatagtaattttctataatgtatgtaatacatgtttgttttttggcataaatacatttggctgtttaaagactggctacatattgatgagaggaataatgttatactttgaaaattttttaaatagtagtagtagggaaagatacagtacaaatgggtgctaagttacttttgttcttgaacattcctttctgtgttgatcaagaaaaacaaatcactactgggagataaattagcaaatcttagctgcagcatcagcagctttttttttttttttttttgtaagagacagtatctcgctttgttggtcaggctggagtatagtggtgtgatcatagctcactgcagcctcaacctcctgggctcaaacaaccctcccacctcagcctcccaaaatactgggattacaggtgtgagccactgtgcctagccagcatcaaaatcttaatatggcaccatgagagatttttctaaacccagacctcatgaaagtggcatgaagtatattacatatttttagtcaatatacttttatataaaagccaaaacacatcacagtaaatacaaaggaaactgaagctataactgcagtaattataagttttaaatgaagcagtgaatgtattagtcagggttctctggagaaacagaaccaataggttatagataaagatacagagaaaggcatttattatgagggattgtctcaggcaattatgaaggccataaagttccaagaactgccacctgcaacctggaagcccaggaaagctggtggtatagtaatccagtccaaaaccaaaggcttgagaaccatggtgtaagtctcagtctgaatccagagggctgagaaccaggagcaccaatgtccaagagcaagagaagatagatgtcacagctcaagcagagaaagcaaattcacccttcctctacttttttcttttattcagaccctcagcagattggacaatgtccattcacattggtgaagatgatcttctttacttggtctaccaacttaaatgctaatctcccctagaaacaccctcactcaccagaaatgttgttttactggctctctcttagcccagtcaggttgacaaataaaattaaccatcagaatgcactgtctggccaggtgcaatggctcacacctgtaattccaacactttgagaggctgaggtgggagaatcgcttaaggcctggagttttgagtccagcctgggcaacataccgagacccacccctctacaaaaataaaaattagccaggcgtggtggctgtagtctgagctacttgggaggctgaggcaggaggaacgcttcagcccaggagtttggggctgcagtgagctatggtagcaccactgcactccagcctgggctgtaacagagtgagaccctatttaaaaaaaaaagaaagaaatgcacttgacaaagttccagtttatgcccaaaaagctttcaaattggagatacctggtttagtgtgtcttctctgtatttcggcgtatttgatatgtgccattccattgcctggaagcatgaattgttcatccttgtcttccaacagaaaagttccatagtgctactgatactctagccttttcattttaaaagctccctgctgcccttcttataacggtctgtaggtctttcccattacccggtctgtactgctacactgcagtggattacttcttcctagaatggtgcttttcttttaagcctaggtaattacatcatattatttattgtgcaacttctagaaaacatcccagatttggaaaccaacagaaaataaatttgtcatttagattaatgtgacttttgatgatatgatattactttccttactctgatcagtgtatcaatgcctttctttccacatttgaatgaattgtgctattgatgaggaaatccaggccaataagggaataatatggaaatataacactgcagaagtagtggatctttaccatattttgtatgtcaaacatatgtctgttgaaagcaaacaatagaaacctcagtttaaaacccaaaggaacatttcagtaagaaatatcagtcttagaaatttcagtcaagcactgaaggttcttgagctggtcaaatattgtatcccatttaagccaaatagtcatcatcatacattgatgtgcatgtagtaccccttgtagactgggggcagttttgtatgccaggaaacactagtgcaagagttgctaaacagtgaatactttccacctctgtatatcccatctctacagtgattccagtttccaatgggagagaatcagaagagtaggaagttgtgatggaagattgtagtgtaagcatttgaaaccctgttcccctaccaaagtgccaaactaatgaattctttaatgcaaaaggaagagtttgtaatgtcataaaaattgtattcctagatagcacagagagagagagagagagagatagagattgtttggaggactttttttccatttatctgtgtatgtctaagttatgtacgattattaaatactaagtagacaaatttacttactgtttttaggaagcatataaaggaacaaaggcaaatagttagaaaatcacttaatcgtagaagcatagatttctataaaacttatattctttattagcttctgctaggagtcctgagctctgaaagaaaggtcagagaatttaagattctaactgcaaaagaaaaccattaaactcactgccttaggtttgaatgtggagctcagaacagtaatgttgagaatattagaacttgtcccattggttgaatttctcattaatggagaagaaccctgtaagaagtcaaagctggcatctttaggtataccacttctacccataacagtgttagatctccacagccccatgcagatggctacaaaagcttcttttctcatcagatacatatatatggggaaaatgttcgagttgtaagggtttggttgaaacatagggtttatgtgttcctgtggggctaagaatggtgcccataagcactactggtaggtctgcagttcagttaaggggataggaataagaaagagaaaaaaaggagacagaagcttaggtgagtggagagaatacaagaaggaaggaaggaaggagagggaaaagaattatgaatggagaaagaaagcattctggtagtgggaattccagtgccattcattgacgctatgccatagatgtaattcttgtgcacacagtaaaattcaagaaccattggttaatggttagaaactaactttgatctaagtttgaactctgtacatttgtataagctacttaacctcctcagtctcaggttcctcatctgtgaaatagaggtaataatacctacctcatagcattgtcatgagaattaaatattacctaagtaagtaaagggcttagcacatagtaaatactcaaaaatgataatataatgaaaaaatataattatattgtatgttctacaagtataaaatttcagaaaatgtggttgggttggtggcatttacatgacaatctgttcattaatgggtacactacagtgaatgttattttcttttgttttctaacttagtttatttcatttttaaactggcttaatttttgcttatctttagttcagtggttcttaatttttatggtcacatgcccttttaaaaaactgatgaaatgtattaattaactctatagaaaactacacttacatacaaaattttgcccactgtctgggtttccaaaaaataaataaataaaacatttaggtttgtttgcccagtgtaatagttttatgtgaaaactagtctgaacaaaccaaaattaataagaatcaaagatttagagtgttcaggcctggcacagtggctcacccctgtaattccagctgctcaggaggctgaggcaggagaatcacttgagtccaggaggcagaggttgcagtgagccgagatcgcaccactgcactgcagcctgggtgacagagtgagactctgtctcaaaaaaaaaaaaaaaaaaaaaaaaagaaaaggaaagaaaaaaagatttagagtgttctaaccaagttgcattattgctagctcccattctataccctaaagctaggcatctaaatactcccctctgcaactagagaaattccctaaaaattgattctttaacttatgccctaggtgagttaatttttaaaaggcagtagctggccagatacgatggctcgtgcctgtaatcccaacactttgggaggacgaagtagaaggattgtttgtggccaggagtttgagaccagcttaggcaacatagcaagactctcatatcttcaaaaagaaaaatcaaagaaggcagtagtttcggaggagaggtagaggggatgaggaagggtaagtagagaaacacatacttttcaagagatgaggtcctgtgatttcatataattttgtgtggcttccctaattaggcattatttttccccagttgcatgttaataatgactcgtgccattgatagcttaatatggatctagtttttctacctacctgcaagggaccattcttcctacctttctgttctctggacccttcacagtgagagatgtgaaactatgaaaaacatctcagaccaccatcttaacttccaacttacatttaattttaaaacaaattattctagagaatgtatccaaaaactggtaagccagcatatacttaaaaattagaatgccttcaggctgtatttatactctgcaattcaacatatactttatcatgtcctataaccattacccctagctatgtgagatatgttaaaactgcttgtgtcctgaagatatttgagtttgtaacctttgctatggcttagtgggattccttacttttttttagaaggtggcaaggaaggattggagagtgggagaatgaaaatatccgttactcacttactgttaaaacatacagtttcaaaggatttgcagacttctcaaacagcatttatcagagggtctcagatcaagagttcctgatttagatcctttattagcttagacatgtatgctactgtttggaatatcatttgttctcagctattatgatttagctatacccggaggattcattatacatgactgaacaatttaaatgtgaagttgctttggaaaggaaagaaaggagagtttcctcaaccagttacctctagtggtgttggagaaatggtcatcaaatgactcctgttcctgtaactttctctttccttcctccatctccaccactcatcctcccaaagacactaacccttttacaccttatttttacagtgttaagaattatcttgtgagattagctatagtcctctaatgctcacctttactatttccattgcctattacttatgttagttcttttgtattttcatgcccctaattatttgtatatgttagattcagtatttggaaatatttgtagaaataaatgaagctaggatgatgattttttctctctctctccagctgatcagtcatttctccctggttaacagatgcttcccagtgctgaagtggctctctctaggcagtacctccattctaaattccatcttctccctgatactgtcttggtgattcatcaccatcatgtcagttctttaatgctttaagaatttttaaaatggccgggcatggtggctcatgcctgtaatcccatcactttgggattggatcatgaggtcaggagatggagaccgtcctggccaacatggtgaaaccccgtctctactaaaaatacaaaaattagttgggtgtggtggcacacccctgtaatcccagctacttgggaggctgaggcaggagaatcacttgaacccgggaggcggagattacagtgagtcaagatcccgctattgcactccagcctggcaacaaagtgagactccatctcaaaaaataataataataataataattttaaaaatttatggcaggtgcggaggctcacgcctgtaatcccagcactttgggaggccaaggcgggcagatcacgaggtcaggagatcaagaccacagtgaaatcctgtctctattaaaaatacaaaaaattagccaggcgcggtggcaggtgcctgtagtcccagctactcgggaggctgaggcaggagaatggcgtgaacccaggaggcggcacttgcagtgagcggagatcgcgccactgcactccaactgcactccagcctgggtgatagagcaagactctgtctcaaaaaaaaaatttattggcggggcatggtggctcacacctgtaatcccagcactttgggaggccgaggcgggcagatcacgagtcaggagattgagaccatcctggctaacacggtgaaatcccatctctactaaaaatacaaaaaaaaaaaaaggttagctgggtgtggtggtgggtgactgtagtcccagctactcgggaggctcaggcaggagaatggcgtgaacccgggaggcagagcttgcagtaagccgagatcgtgccactgctctcacagcctgggcaacagagcgagattccatttaaaaaaaaaaaaaaaaagaaagaaaattattttgttcagttgttattagttatcctcagctggaaggtcttcaattactgaaaagtccctgccattatttcctttgggggaaaaattctagcatttgtatttttaaattgcacacacatactaaagtatgtaaaagtatttttttattttgtgctcacaatgaagctagacaggagtagactgtgctctaaaagactcttagaatgccacctatttggacacagaatccccattaaattctggggaattctatatattctgaaatcgaaatggtattattaaccagttgattacttgtaatacaaagaagttcccttttcaaggaggcttctagagttggactacaagatccatctctttgagcaaactgtcttatttggacttggtactaaatctcaaaggaattagaattttgcatcaaaattttgacaagttttgcctatcattgttatggtactacgcatgatactgaattgctcaaaaatttgcctttctgcttctgatctccatttggtgttactcaatctgttggcattagattgggagtggggtgggatagagaatatagtctacttcatccagccacaaatcccaaatgtcccaaatgtatttctttcttttttttttttttttttttttgagatggagtcttgctccctcgcccaggctggagtgcagtggtgcgatctcagctcactgcactccacctcccaggttcaagcagtcccctgcctcagcctcccgagtagctgggattacaggcgcacaccaccacacctggctaatttttgtatttttagtagagatagggtttcaccatgttggccaggctggtcttgaactcctgacctcatgtgatccgcctgcctccgcctcccaaagtgctgggattataggcatgagccaccgcacccagccccaaatctatttcttagatcattgaagtatgctcagcattattattttctgcttttatattaccttctacagtagtcacaatagttacattataattctgagtaggtgaagctgatgtttatattgctgccagaaaaaaaattttaatagagaataagagctatcatgcaaaacaactggagaatttctttaagggtttgaagaggattatgagccacaagctttaaaatacagtctagatttctgtttcttggctctgttgcaaaccaattttgaaaggaatgttgttatctgatgaatgttatctgatgattaatgttttattaaaactgagtatcaaaaggcacataatacatttttgtattataacacaagatgcctactatatctacatattaaagacttactcttctgttaatccctgtaaatcctctttggtactgtggaacagaaagctgcccttaaaatctaaaggtattatttgttttacatagtttcttttacatgtcttaaagtgaaagagcattggttagaattcatttgtgtagaagtaaaacttccattacaatgaagggcataaaatatggatgctgttttctggttccttaccagagcaatgatattttattttcttggttaaaatttattctatacagtgaattatccagtacaataactgccttatctcgtccctaaccaagtaacattttttataatgacactgattatatgctggttgccctggagagaagaaagaattaaactacagctgagtcatcacagcatttttctttttctttcttttcttttcttttttttttttttttagatggagtttcactcttgttgctcaggctggagtgcaatgacacattctcaacccccgcctctcaggttcaagcgattctcctgcctcagcctcctgagtagctgggattacaggcgcccgccaccattcccagctaatttttttgtatttttagtagacagggtttcaccatgttggccaggctggttttgaactcctgacctcaggtgatccacccacctcagccttccaaggtactgggattacaggtgtgagccaccgcccccggccatcacagcatttttctaatgaaaacttttaataactgcagtccctcagtcatttcttctcaaacatccaaacaagaaaaataaacactaaaattatgaaaatcacccatttaaataatttaatacatcatctcctttatgcctgctactgtatccatagtgatgtagtcactgaaacatagtaggtgttcactaaatgtgtgctgaatgagtgaaatgaacctaagaactcagaggaagggaaaaagaagaaacttagtatgttataaatatatataaataacatatgttctctctactaagaatttctctttagactttctaatttactgcaaaaaggcttataagcctgaacaactacaactatgacttcttaatctgtgtttataatctaatttcactaccttgggggttaggagggtagggagtggtatatcttttagtggtttttgatttttcattgttttaaatttctgctaaattatcttcttccatggaagggaggctacatacaaggtaaatgcgaatggcatatcagaaggaaggtgcgtaaaactttactggatcagaattctgccatatccaccacctaagatcaatcagtgtgagggaaagggaataaatgtaattagataacataattgtctataaaacaaagagaatttcaggaaaatatctgttagcaaaatataacacatttatcctcaaaaatcaaggaaaaaagagaaatacatgaagtttatcttaacactatcctttgagagactgagtgtgtagacagacagtgaccatatataaaaatagaactctgtcctctggtctgcagcaaccaacccaagaaaccaacctgctatctacaagtcagaccactgtctctagcagacagtccaagaagataacagtaacccttgtaacaatcaggacaaaatggccagggcttgattattaactgatgacctctctaatttttgcccttgcttccaacttaagaccaactggagaaagccaaatatgcacccctaatcaatctcatggtatgccctgtttctagttaacctgcctgtagcttctccaagccaggtgcttccagttagcgcatatctgaagcctttccttttttctattataaaactttcccattcctgtgcctgcctttgggtctctgccaaatgcaggtgattgtggctgactcccctgctgtagcaagtgctgaataaacaggcttttcctgttaatattggggtgatcttcacttcatgcccttttcacataattacactgttctaagaatatgtatgacttccatgcttgaacatacatacacaaaataaattttttaataataatcagacttattcatataaaaaaattaagtgatgtaactggcttccttatgctttatgagaacaatagcatagcaccgatggtagtaaaaatgacaagaacactatttcacctggaacaatagctactataattccactctacaagttctttcttttactggcctgggttgttaacaccttcaccttagcatcctcccctacagccacttgtgccattctcttttgttggtaccttatgaacttcatgacagctgccatgctgtcactgccagtgacgaaggcagatttttgacatgactttggcatctattaatgtcttagtgatgcataattttccacattaattgatttgacttagtcatctcttggcagtaaagctatgcagggtgaggtaaagcccttttctggtatactctttcaattctttacagtacttctagttttacagctcttttgttaccctcattttcttacagccttatactacctccactccacctacctttatccccacttggagaaacttgaaatctgtttcctggaattaagttggaaaacacaaagtttcaaagtgttgcccccccaaattgttgctcctacgaacattaaagaaagtttctgtatacatttagggacatgcttgaagaattgagaatgtaatctttgtccatctccgtttctggtttaagaaacctgatgctagagctaattaattccttagcatatcatcattatttctaccaaatttggtgtaaataaagcccctggtaacctgctttgatatgtcagtattccagagtaaatgcggagattcccctctcctactctaactacttttacattacataaatatgtttgtatgttagcagagcaatatataaacacaaatacctgtaatatagatttctataattgcatttatataaatgtaattacatatataaatgtgttcagaagagaaggtcagtgaggtcactatataaaaatgaatggtattgctatattctagcaaagaaccattggaaaattaaatccaaaaacaatttaatttacaacagcatccaatatcataaaattatcagagataaatttagcaaaatttgatcaagacttgtacactaaaaattataaataaacattgttaagaccaattaaagacaaccaacagatttctcatgtttatggattataagatccaatattggtaaaatagcaatttccccaaattgagtgaacataatccaaagaaaaaaactatttgtagacatttgcaaactaatacgaacatgcaaatgacctagaatacccaaagcaatttttcaaaaggataacgaagtttaaagcaattttacaaaagaataataaagttaaaggacttatttttaaataaaaatgttagggaaattaagtggagaaatggacattgacccttacctcataccatacacaaaagttaagatttagctgaggctgaaggattgcttaaacctaggagtttgtgaccagccctggcaacctagcaagatccggtctctagaaaaaatttaagaattagccaggtgcagtgctgtgtgcctgtagtctcagctattcaagaggctaaggcaagaggattgctggagcccagtagtttgaggctgcagtgagctatgttggtgccactgcactcttacctgggcgacggagtgagaccctgtctcccccgccaaaaaaaaaaaaaaaaaaaaaagatttagacctaaatgtaagagctaggactgaatctttgcaaccttggggcaagcaaagatttcttggataggacatgagaaatgtgagtcataaaagaaaaatgtgcaaaattggactttacctaaatttaaaagttttgttcttcaaaatacagtgtttagaaaatggaaagtggagccataaaataggagaaaatatcagtgtacatatacctgacacccttgatccaaaataaataaacccttactactaattaacaagaagacaactgaattttttttggcttgaaacaaccaccattttattatgacaactgaagttttaaaatggatgaaatatttgaacagttgttcacaaaagaagatgtaagagtggtcactaaacacgtgaaaagatgttcaacaccattatcaggagaactgcaaattaaaaccagaatgagataccactgtgtatttattagtataactaaaattaaaaaggctctcactgccaagtgttggcgagaatatggaggaacaggaactctcatgcacagcctgggagagtataaagtcaccagtcactttggaaactggcaatttcttatgaagctaaaattataaactttataactcagccattacacacctatgtgttttccaaagagaaattaaaatatatgtccacttaaagactttacatggacatttatagcacttttatacatatcagccaaaaactggaaacaatacaatgtttatcagcagggaaacaacaaaatgtggtatccatacaaaggaatactgctcagctatgaaaaggagcaaactattaacatactcaacaacatgacgatctgtaaaacaggctgaatgaaaaaccagactagaatacatactgtttaattccttatataacctatttaattacttatataagcttatgtaagattatagaaaatagaaactaaaataacagaaaaaaggccggttgcggtggcttacgcctgtaatcccagcactttgggaggctgaggcggacggatcacaaggtcagaagatcgagaccatcgtggctaacacagtgaaaccccgtctctactaaaaaatacaaaaaattagccgggtgtggtggcgggcacctgtagtcccagctactcaggaggctgaggcaggagaatggcctgaacccgggaggcggagcttgcagtgagccgagatcgtgcagctgcactccagcctgggcgacagagcaagactccatctcaaaaaaaaaaaaaaaaaaaacaggaaaaagatcagtggttgcctgggactagagttgagagtgagtttgcctgcaaagggacacatacagacttccagagagtaatgaaaatgttcagtatcttgattttggtagttttaccagatgtatatatttatcaaaatttactgaattgcggctgggcacggtggctcacacctgtaatcccagcactttaggaggccgaggtgggcggatcacttgaggtcaggagtttgagaccagtctggccaacatggtgaaaccccatctctactaaaaatacaaaaaattagctgggcatggtggcacacacctgtagtcccagctactcaagagtctgaggtgggagaatcgctagaacccaggaggtggaggttgcagtgagccatgactgtgccattgtactccagcctgggtgacagagtgagactctgtctcaaaaaaaaaaaaaaaaaaacacaaaatttattgaattgtatatgttatataggtaatagtttattatttgccaattatagttttagaaagagaagatcagtagatgaataggaaatggaattgaatctggaataagatagcaactagatggtagtgagtgagtaggaaaatgactaagagaatgcttagattgagcagaaaatatatggtaagaaaagccactagaattttatcgtagtctgctaattaagttatggttgtatttgagtcaaatacctaaaaattaaatgcctacaataatggtacatgagaaaccactccaaaacttacagcaaccaaaaataagcactttaaaaaactcatgggcttgcaagtattggttgaaatggctctgattcgtgctgtaggttggctggatggctctagcattcaagttgagctcatcatctgtgattgtttctgggttcaggctgaaggggtatcagccaggagcttctcctggtgtatcaccagagcacaagaacacaagttaaactgtacaggcacatttcaagcctctcctcgtaagatcgcattgtccaaataaagtcacttggacaaatccaaaaaagttttattgtgggaagtataaataaacataaccccaaggtacttctatgtccctatcctccagtttcaacaattatctctattttgcaactcttgtttcttatatttcttccctcttctattatgctcaagggcactaataaatatggagcagcgccttaaaaccaactgccctgggccaggtgcggtggctcacgcccgtaatcccagcactttgggaggccaaggtgggcgggtcacaaggtcaggagatcgagaccatcgtggctaacacggagaaaccccatctctactaaaaaaatacaaaacattagccgggcgtggtggagggcgcctgtagtcccagctactcgggaggctgaggcaggagaatggcgtgaacccgggaggcggagcttgcagtgagccgagatcgcgccactgcactccagcctgggcgacagagcaagactctgtctcaaaaaaaaacacaaaaaactgccctatgggcgcacataagctagaggtggttgctttgattcttgaaaagtagtgggcattgattctcacagctaggagctcagttttggaaggatgtggaagagcttccgtgcctttttcaacatttgttgtgacaaattgcggcccctgcttttagcagctgcttattttctaacattcctcagaacaatgaaaaattcaggtaatcgttcgagaactaagaaatgaaaatatagccaggtttgctttggcagttgggccaaactaatcattgtttttacaactctgttaaagagaaagcatgagtttatttgattaaatatggcacagatttctaagtcttgaaatagatgagaataagcagtttataatcaacaaatcagaaaatgtaaacaatctgatgtgcaaatgctaaaagaatgctgagaattaagagagtctggggaactagagatatagtgtttgtgtattatttgtgtgcagcttgccatgttaggaatacagattaggaatttggatacattggctattagacattcatttcttggcacagttttaatcattgtttaatccctgtgcacactggctaccttaagtagaaggtacttttttcaaatgttgtaaagtgtaaaccatctctgactggagaattggcatcatcaagaaaataatgaccaacatatattctgaaatattcagtacctgcttttttacagaatcctctttttgagggggcctgtattatatttatcacagagtttaatttactgtgatttaattaaactttatttttttatttcccccgtgagactataaactcctcaagaataagggactgtgctcattgtatcatcagataattctgctagatgctgttaaagataaaaatatattaagtagctatttagacaatttgtacttaataatcacagttttcttggcaggatgatgaaatggttgagaacataggctcaagaaccagattgcttggacttaaatattgtctctgttacttaactaactctgtaaccatagacaagcaagaacttaatctttgtgtacctcacttttgctatttgtaagataagaaatgtcgtgaagattaaatgatttaatacatatagtgcatttagaaaagtacagtaatatctcaataagttattgttacagtcatcactactactactaatagtactatcaacattattccagaaataaacttcaaacactgttttaaaataatattaaatatgctgcatttaatcagttgtgatcaagtcctgtatttatgttgaattggcaagtcaaacaatttgaacctacaaattgttccctctgctctttttccctgactctactgttcaatgtcaaactcatccattaatttcaagtacaccctcctctaagaatcctgttccatccctttcctcccctcaccctcccaaaataaggataattgttttgtctctgtgctcttcctagcacttcctttaatttacaaaatatttcttctaggctgggcatggttcatgcctataatctcagctctttgggaggtcaatgcaagagggtcaggaattcaagaccagcctgggcaacatagggagactacatctctttaaaaaaaaaaaaaaaaaaaagccttggtgtggtggcacatgcctgtggtaccagctactcaagaggctgaagtgggaggattgcttgggcccacctgggagttcgaggctgatcgtgtcactgaactccagcctgggttgacaaagtgagaccctatctcaaaaaaacaaaaaacaaaaataatggcttccctctagccttaatgccattgctccactttaagttgttagctgatatgagaagagtggtcaagtaaagttgtttgtgatttgttggaagatgttggaatatgtttaacactcaatgggaaaaactcatctgaaagcacgagtatgaatttgagaaagactaatcttttttatcaagtttccctgaggacaggcttcagtaagatccaaaatataattggaaagattcattttagataggaaaagggacaatattgctgttaaaaggagggaaggatgatagagttgatgggttcaggacaagtattactatttaaacagtatcactatttaaaaggatgaatgatgtataggcagatttatatgtttgtgttatcaggaagctgagaaactttctagtctttttgcctcatcctcctccaatccattaccctcaatgcaaccagaagaacctttattatattcaaatctgattgtgtccttctctaagaagtacttacttcatgctttcagaaaatatttcttgaatgcctcctatgtgttaggcactgagaatatagtagtagaaaaaagtaggcaaaggcctggcatggtggctcacacctgtaatcccagcatttgggaggctgaggcgggtgaatcacctgaggtcaggagttcgagaccaacctggccaacatggtgaaaccgtgtctctactaaatatacaaaaagtagccggccatggtggcaggtgcatgtagtcccagctactagggaggctgaggcgggagagttgcttgaacctgagaggcagaggttgcagtgagtcaagattgcaccactgcactccagcctgggtgacagagtgagactccatctcaaaaaaaaaaaaaaaaaaaaaaaaaaaagagtaggcatagtgatgtaatttagctccgaattagagggacgtgtgtgttcctactaaatttgcaatgtcacagagccgcctcttctttctgcttactcttctcagtagagaggagggagaataaataaagatactctttatataactgcccatggtttgttagtgatacatatctttaatggtcttctgataataacctgaatttacccagggttgatgttggaagggcttctgtcctcttgctgttggtcctctctctaaactagctccctgtaggttcagttggcctagtggaaggtagatgaacctgagtggtatagactaccctctacagtctcaactttggggcctataggcacaggcatgaacttctttctaggcatgttgaaaaccatgaaccaggtgaggaagggagaaagttgtattgtcatgcctactgaaatggaacatttcaacaagccagcagggagaaaggtagtcccagaggtctgtatttaaaatgcgtcttcaaggtcttttgttcattgccctgtgggccctacttgtcaattccaggaaaacagaaatttcacttgacaccgacacctcctaccaccttaaattctgctttgtcgggtaataatattgcctctcggaatgattgaacctccaaggaccacatttagcaggtacagccccctctccaagtggattcaccagcatctgtcaaccagaaaagctggagagatctaaggttgttgctgtttcccttgctcttggctcctcactcttcccttgttattcggtggttacagaaaatgaagcatcactcctgttctcatctaccttcagcttccagtgtacttgcctcgtgtcactaccacccttattttgacagttgtatcactccagtgaggtgtaggtagtaggcggaagagaagttgagaacttgtgttctggctgtcatttccacagaattcctaaatagccaatttaaaacaaaggttttcagaggaaagcgtggggtgccatcactgccaccagcactgctgtgccagagccgagccctgcctccccttcttcctgacaccaccgctcatgtcctccagcctgttcctacaatctgttgaaacttggtagaatactatgaagttctaggcatgtagagacatgcccacctggctccccccgctccaaggttattaaagaggcatattggaaactggcaccaaagtggcatccagataaaaatcctgagaatagagaagaaacagaaaattccgacaagtagctgaagcatatgagatattatcagatgctaaaaaatgggacatctgtgacaaatatggcagagaaattaaatggtggaggaggagttggaagtcattttgacagttcgttttagtttggcgtcacattcctgtaacccagatgatgccttcagggacatttttggtggaagggacccatttttattcaacttctatgaaaactcatttgaggacttttttggggaatcaaaggggttcctgaagaagcagaagctgaggaacagtcatttttctccaccttgattggatttccatgttttggaagtggattttcttcttttgatacacaatttgcttcattcaatcatgaggtcatggaggcctcacttcattttcctccatgttatttggtggtagtgccatgggcagcttcaaatttgtatcaacttatacctaaaatagttgatggcagaaaatcactacaaagagaattgttgaaaagggtcaagaaagagtcgaagtgcttaccgataaatggtgaggagcagctgctacccttgcataacaagtaactcaacacactcatttgaacagaaatgttaaactataacaagcaccattgaggattaaggaacatttctttgaagatttcagatgaattcgactttctttttcattgtgcctaatctagagtatttataaacagctcattggagtccctatttgtcttaaacttttgaatttattgatgaggccacataataggaccttttttttaaacttcaaaatagtaaatctctgtatgcactttgctttcattattaaatatactcttagttgaaccttgactcttgagtagtggtaggacaagattgtacacttaacaccagcatggatctgcttttccattgtgtctgaaatgtgagccaggtgtagtgtcaagtgacgttaacattgccagcataaatcttccacagaaataattcctatttttttctgtcaagtgaagttaacattgccagcatggcagcatgaatcttccacagaaataatttctatttttttctctatttagtagtgcaagatattaatgcattcgtcgtaatacatttctagtttaatataaataaaggatgttttctagttgtggatgaatgctagcaacttagttttgacagtggtttaaattagtaatgttaagctgaaatttaaaaactaaagtttgagagggtcgaaaatttacctgctgcgtataatgcacactcattattcgagtgatgggtacactgacagtccagactccaccactgtgtcatacatgcatgtgagaaatctgaacttgtattccctaaatatataaaatattttttaaaatttaagtaaatctggtaaactgagtctttgtcatttgttttttaaaaaaagaaatgcaggctgggcgcggtggctcacgcctgtaatcccagcactttgggaggccgaggtgggcggatcacgaggtcaggagattgagaccatcctggctaacacggtgaaaccccatctctacgaaaaatacaaaaaattagccgggcgaggtggcgggcacctgtagtcccagctactcaaaaggctgaggcaggagaatggcgtgaacccgggaggcggagcctgcagtgagccgagatcgcgccactgcactccaacctgggcgacagcgagactccgtctcaaaaaaaaaaaaagaaatgcaaatgtgtttggtgcagtctttcctgagtgggaaaaaatagataaaagttttcattagttgaagatctatttaaaacataacatatttcatatataatttccttgaaatctcttgatttctaatattatgtctttataagacaggaactttaaatgaaagatctaaatgtttagagtagtaagtttgctgatatttagtatccctcatctgagcaacttaaatagtattaaaatatatagcttaaatatgtagtgttatttgtttttttcataattctagacttgtttcttagagtaaaaaagcataaacaagtattgttgagaatattgtttcattctcaaggtcagtgccctaagtttttaatacattttttgtaattttgtagaaattataaatacagaaaggaatgcaaataacagttatgccttgctatgaaaatttatgaagtgaacacaaattaagatattgaatgttttcagcagttcagaagcttccttcatgcttcctctgcatcattatcctccccttacaaacatacccactgttctgactgccatcatcaattatttgttttaccaatttctgaactttatataaataaaatcatttagtatgtattctttttttttttttttggagatggagtcttgctctgtcgcccatgctggagtgcaatggcacgatctcggctcactgcaacctccgcctcccaggttcaagctattctcatgtttcagcctcccgagtagctgggattacaggcgcctgccaccacacccggctaaatttttttgtatttttagtagagatgggatttcgccatgttggtcagatgatccccccacctcggcctcccaaagtgctgggattacaggtgtgagccactgcacccagccctatgtattcttttgaaactatcttcttttgttcagtaatacggttttttttttttggagggggggttggggacagagtgtgagacagggtctcactctgtcacccagactagagtacagtggtgcaatcatgtttcattgcaaccttgaactcccaggctcaagccatcctcttactttacccacctgagtagctgggactacaggcgtgcactaccaggcctggcttcttttttaaaaaaatgtttttttggagctagggttttgccgtgtcacccaggctcgaatagctgggactacaagcatgtaccaccacacccggctagtttttgtatttttttggtagagaaagggtttcaccatgttggccaggctagtcttgaacttctgacctaaagtgatccacccgcctcggcctcccaaagtgctggaattacaggcgtgagccactgcacttggccttgatggacattttcaacttgggctatgatgaacagttttatgaacatttgttatgtgtcttttgatgcacctattagtatacttttccttttttttatacaactagtagtggacttgctgagtcatatggtttctgtaaaatggcaaacattttccaaatttgaaaccatacattttttaaatgccaaaccttttatccaaatttgatgctaccagtttacattcccatcagcacagcagtgtttcagtgttcctttgccccctactgtcagatgctattttgtttgttttgtgtgccattctgcactgtatatgtgtagcagtatctcattggagttttgatttgcatttcccaataatattgaacacctttacatgtgcttattagctatttggatattctcttttgtaaatcctgtatagatcttttgtctattttttaattggattgtctttcttgttgatttgtagtagttatctcactctatggcttgcccttttaccttcttaatggtgtctttggtgaaaagattgactttgccaatcttttttcttaatggttgttgccttttgggcctttgtaagaaatatttacctagttctaggtcataaagttacactaaaaggtcgttttccagaagacttattgcttcactttttacctttgggtctataatctatatgaaacttattcttttaaggacaggatttacttttccatatggatatcatattgatctgtcaccaatacttgaaaacactctcatgttactgaaacactgcagtgaaacttttgttctgaatcaggtgattatatatagagagagatctgtttttggatttttaaactctgttccattgaccacctttttatctatgcttttgtctagctgtgtcttaattactttagctttatattaatctcgatattaagcagtatgcccttctctctctctctttttttttttttttttttgagacagtgtctcactcttgttgcccagcctggagtgcaatggcgcaacctcggctcactgcaacttccgcctcccaggtacaagtgattctcctgccccagcctcccgagtagctgggattacaggcacctgccagcacacccggctaattttttgtatttttagtagagtcgggtttcaccatgttggtcaggctggtctcaaactcctgacctcaggtgatccaccccccgcttcagcctcccaaagtgctgggattacaggcgtgagccaccgcacccgggctttcttcgagtcttctatactattcttggatctttccatttccatgtaaaacttataatcccttagtctttatggtgacatattcctcaaccagatttctgggagcgtagcctaatgcgtaaacacactgcttacaaagagccaaaataaaaccaagaactacaaatttaaatagttttaatcagcataatgcatgagtgctgtatgatttattttgtgtatcacagtctcacagagattgtttttcaacaaccagatatctgtttctcatacctcaaagttgtcgtcattattaaagaagttacagaattccattcaaggaaagtactgtctttgtttagggacatatcttaattggagtgtattgtgttatgaagatgagaccctcttcatatcacctggatggtcatggatgagacaaacatataggtcaaataattgatatgatgacttgagaaattttgagagttttgagcaaattcagtgggcagaggggagctggggactgatgcctggcaatatggtgagagactggacttggagatgacggtataacttaggagtaaagagcctgaggtctagagccagattgcctggctcagccacttactagccatatgaatttggtaagttacttattctttgtatgctttattttcgttatttgtaaagtatggataatattgcctaccttgtagggcagtttgatgattaaattagttaatataggtaaaatgcttaggaatagtacctggcatgtgcaattaactagactacagaccttactcagatttggttaatggtatacttaattgccatatatagctagctattattatagctaataaaagttataatctgccccagagagaacaaccaccaaaaattatgttttttatatatatatatacatatatgtgtgtgtttgtgtatatacagacacatacacatatgtgttttttgaagaaatgttctaagtgtgatgaaaactataaacccacagatacaagaagttcaatgaatcctaagcacaagaaacatgaagatttcactaagacacaatatgaaactgcttaaaactaatgataaaggaaaaactattaaaatcagtcagaaaaatcacagacagtggagaaacaaagatgacagcacacttctctttgaaaaaaaaattcaagacagaagacaagtggggcagcatccttttttaaattctttaattttcaaatttaggaatagcatctttaaattactgagacaaagacactatcaacctagaatggtataccctgaaaaatacatatttcaaaaatgaaagcaaagtgaaggttttctcaaacatataaaaaatggaagactttatcaccagttgacttgtactacaagaaatgtctaagaaatttcttcaggcaaaagaaaaatgataccacatggaaattcacagaactatacacaaaatgtacccaaaaaaccccaaccacaacaaatgagtgcaggcaaaatctgacaaaatcaggctggccagggtgacatgcacctgtattcccagcatgctgagggtgctgagggtgctgagtttgagaggaccacctgagctcagaggttccggaacagcctggacagcaaagctgagaccccatctcttaaaaaaaaaaaaaaaatctggctgggtgcagtggcgtagtcccagcactttgagaggcctaggtgggcagatcatgaggtcaagagatcaagaccatcctggccaacatggtgaaaccccatctctactaaaaatacaaaaaattagctgggcatggtggtgggcgcctgtagtcccagctactggggaggctgaggcaggagaattgcttaaacccaggaggcggaggttgcagtgagctgagccccactgtactccagcctggtgacagagtgagactctgtccaaaaaaaaaaaaaaaaactggcaaaatctgaataaggtttgtagtctagttaattgtattctcccagtgtcattttcccatataactcactgtggttatgtaaaatgttacctttgggaaaactgggtgatgggtacatggttctatctgtactgttatggggttttcatatttattaataacagctatactgaaatgtaattcacataccaaaaaatacatccttttaagatgtacacctcagtgatactttagtatatttacagacttgtgtaactatcaccactaattttagagcatttttatcacccccccccaaaaaaaaatgtcccgtgcccattcacagtcactccccacacaacccagtcctaggcaatggcttgtctactttttatttccacagatttgcctattccagacatttcatatgattggaatcacacaatatgtagtcttttgtgtctgattttcttagcacaatactttcagtgagtgttctttcattttatggcatgtatcagtatttctttttttttcatggccaaatgttccctaatgggaatatatgacattttatttatccattcaccatttgagggacagtggggttctatttttgactgttatgaataacactgctatgaccattcatgtacaagttgatgtgtgttttcagttcttttgggtatatgcctaggagtagatctgctgagtcacatggtaactctatgtgtaacatcttgaggaactgccaaactattttcaaagtgtctgcacaattttacattgctaccattattgtatgaaggttccaataaatttcactatttcttattgcttgtcttttttgttttacccatcctagtggatataacttgatatctccttgtggttttgatttgcatttcccttaatgactaattatgtcaaacatcctttcatgtacttattgaccatttgtataccctctttggtgaaatgtctattccagtattttgcctatgttctaattcatttatttgcctttttatggttgagtagtaggagttctttatgtagtctgggttcaagtcccttgaacacatgattcacatatattttctcccatttagtgggttgtcttttcactctcttgatggtatcctttgaagcatgacacttcttaatattgatgaagtctgatttatctgtttttccttttgtcacttgtgcttttagtgtcatatctaagaaatcattgcctaaccaaaggtcacaaagtttactaccatgttttcttctaagagttttatagttttagcttatacatttaggtccacaatacatttttagttaattttgatatatgaggtagggcttcatcttcatacctttgtttgtggttatccagttgtcccaacaccgttgaagagattattttttcccattgaattgtcattgcatccttgttaaaaatcatttggccaaggcaggaatggtgactcatgcctgtaattttagcactttgggagggtgaagtgggaggattgcttaagcccaggagttcaagaccagcctgggcaacataatgaggcaccatctctacaaaaaaatttttaaaaaaattatccaggcatggcagtgcatacctgtagccctagctactcaggaggctgaggcaagaggattgcttgagcccaggaggtcgaggctgcagtgagccatggttgtaccactgcattccagcctgggcaacagagcgagaccctgtcctagaaaagaaaaaaaaagatcaattgaccataatgtaagagtattatttctggactctttatttcattggtctattctgatgccagtaccatactgccttgattaatgttgcgttgtaataaattttgaaaataggaaatgtgagtcttccaactctgttcttctttttaaaggttgttttttaattttgggccccttatatttccatataatttttatgatcagctggtcaatttctgcaaaaataagggaagaaggaaaggaagcgagtaagcaagcagctggaattttgataaggattgcattaaattggtagattgatttggggagtattgatatcataacaaaattgtcttccaaaccatgaacatggaaaaccataatgcaccctcccccctgcaaaaaaagaagatttgatacacacaatatggatgaaactcattctaaaatacacattgcctccaaagaccagacaatctttaaagtatgtcaaagaattttcttaaatttttttaaatcactttctctgttcttaaaaattaagaacccaataaccctgataatttagcactgatttctctctcttaagctaccactatttccattaaatcctcccttttagtgatcttcaaatggccctattgttaattgtaatgagggggaaaaaggctatctttattccactggccagacttttttctcctggtaaattttcattttgcaggcagagaggttttatcgtagcagttacttgcaagtgggaagtagaaatgaaacaaaaagggaagaaaaatggtagtatttaaggaagaatgcagaatcaacgtacactaagtaggaaaaaaatgaaaatgcgtgacctggtgacattttaagcatattttaaatgaaatggtttggaggggaggacctggctttgtgtttcaacatacagtatttgaatacactattatgttggtgcaaaagtaattgtggtttttgccattacctttaatggtgccataatggcaaaaacctcaattacttttgcaccaaactaataaattcctgcaagtgagaagctgttcatctggtcctacagagcaacttcaaaatatatttcagatattcccaccttttaaaaaaatatattatttatttttcagacaggatcttgctctgttgcccaggctggagtgcagtgacatgatcatggctaactgctacctcggcctcctgggttcaagcagttctcctgcctcagtctcctaagtagctgggaccacaggcgcgcgccaccacacccagccaatttttgtattttttgcagagacggggtttcaccacgttgcccaggctggtcttgaactcctgggctcaagtgatcaacctgcctcggcatcccaaagtgctgggatttcaagcatgagccaccgcgcctggccccacccttgtttgttttcagaagtaactatttttaatttattttaaaataggaaatgaaagtggaatagggaagaggttactgacagttaagtctgtaatctagaaaccagaaaggaagtgcctctactgtttctactttattccaccagaaatcctggcatactttcaggaagaggagacagaggcagccgttgataatctaagacttaagatggagggattcgcaattaggtccctgtctgttatttgagaagcccccactaattcatctactaggcctttcataatgtgtaaaattttactcaagatcaacaaataagaaaagttcaaaacaaatgtaattgccaaagatagttttttcgtatcataacctggtatcggatttctttcgttatagagtgcacgacagataatatattaatgtcatcctcaaatgatattttgagacgaggtaagtaaataggaaagaaaaagtagatttagcaaggtttaaaaaataccagtcaaaccagatgaaaaggacctggtgtggtagcagtatctaatatagccactcacagaagaattcttgaacttctttctgcattagtacttggaagtactgaaagtagtaatgtagaaagggttgcagttatctgtctcttaagaacctccattcgattaccttacttagtgtttacaacatgctttgttaagattattgagattaacatgctatgagcaatatgcctattattacaagttatctcttattcagacattctcaccatttgtaatatttctttccagtgaggaagacactgtgttgtgctcattgggagcatagattctggagtcagggagctcaagttctaatcctggctctgccatttactggttttattactttgagcaaataatttaatgtatctgtgcctctattttctcatctgtaaaatgagggtaataatttctaccttagaaagtggaatctaaagttatgaaggttaagctaatatatgtaaagtgtttacactagtgacttgtacatcataagcattatgtaagtatatgctaaataaatatatactcttattttccatatagattataaacttttcaaagtcaatgactatatctccgtgttgtataaattctcgtatctgttgttaaccatgtacataggaaacacttattatcagagtaactttgtaggagacagtgaaatagagccccagaatatctagaggtctggaatctacaatgagaaaaatttgcaaaagattagttagtttaacctttaggagggaggaaagtgttactcattaatttgaagagaccagttttgccttttcattttatcaaggaataagaagctttcaattgttcttgagaaaaaaataagttatctaaatgtttataacataaaaataaccctactgattctcttatttctgttctgtggcaaagaaatctatttatgttgcctctgggaggataataggagaggaaaaatagagccttgtttttctaccttgacatacattcagtgagagttttgtagagatttttcacagatggaacttgagttcagtactaatacacaaaaatacacatataccctatctctgacccccagcttgtgactttattagagaagttgatataaatgttaaatggaataataacaatgcagatcttaccttcttagcatttggagtggtttactgtgtaatactgaatatcctaaataataggatatgattgtgttttgtgatgctgttgttttggcatcaaaccgtatgacacttcagttaatgcttgtaatgctaatggatatatctgaccccataaaaagatttttgtaaagtcctttaaaatctgtgctactgtggattgttacaaggtgagattaaatgctctgaatttagaacaaagcctgaataaatatggacggtaagtcaacctaacataaacagatactcattttaggtaaaattttttttctgcctcacatttataatcattttgagttccctggctcatttttatttgattcgtgtaaattttttacttggaagcgaatttatattgggagtgagtagtccaagaaaaacctcataactttgtaatttttgagttaaaatgtgaaaactaaagaaatgaccaaagtgaatgtacaaatagttgcagaactagaccattttattttgaaagattcatgttcttcaatgccttcttgttacaggtgatgctgaacaggagcttggcccccctccatctgtagatgaggcagcaaacacactcatgactcgtctgggtttcctccttggagagaaagtcacagaagttcagccaggtgaccaatacagcatggaagtacaggatgaaaatcaggtaagctgtttgctatcacctttgtgaaacatggtgtgaatcagcttattatgccagaaataatcccaattgttgaatgccttttgaggcctagaatacaacttaactttccataatcactattatttcttcagtttatgaataatcttttagctttagtcttagatttaacaacccaaaaagccacttttaggttttgattgatttaatgaatgaacgagcaagccaacaaataaaattgacacgtatataagcactgcaccccaaatttgcagaatatacattcttttcaagtgcatgtggattatttaccgaattggttatatgctgagccatagagcaggtcttgacaaatttccaaagattccagttactgtgaccacagtggaatttatcaattacaaaatgataatttagaaagtgggatctaaaagattacttggatcattagttcagattttctacttttctgaaatacacatttaaaactaatatttctttttaagcacatctttagctatatcctacaagtttttttatacttagtttttattccaatttaaaatattttctcatttttttgtgatttcctcttggactcaaaggctacttagaagtgtattactcaatatctaaatatttggggattttctaagtatccgtctcagaaagttaaaaaaatctacaatttaaaaaatattttatagttttctttctttttgctattttcatttttttcagtttaaatgtagcaaaaaaaagtactagagtcagattcatttgtatgatcttaatcttcagcgtgaatgtctgatagtgaagcattttattcaggagatgacaaattaattttaaattgcatattttattaataaatattagtgaagagtctatatcacatactacttttgttacaatgagatatacaaggattatttgaatatatttatatattgtgtggataagttcagatgttccagggtgctgtcctcaagcctcactccttaggttattggttttgctagctgcacattatttaaatactatcttaactcccaaattatctctagccctgccttttcccctttacttgaaatttgtatatttagcttcccacattatattttctacctaatgtttaaaatgtatctcaaacttaacatgtcagatttctccctagaacctgtgccttctgcagtgtttcccatatgagtaaatggtatcacctacttgcttaggacaaaagcattggagccatttgacttccatcagacccacgttcactctttcagcaaatcgtagaccctgtcttcaaaatatgtactcaatctgatcccttctcactattcccactgctatacccaagtccaagccactgtcatcttttgcctgtgctactgcaataggtactagaatgtaaggctggaaggctgggatttttgcctattctacccgttgccgtatcctctgcccctagaacattactgtcattactaggtgcacagtaggtatttattatatgaataaatggtctcctaataggtctctgtgtccactcttgcccccctgtagtctgttcacacagtaaccagagtgatccttgtaaaatatgaatccagttctgtcactttgcttgtaatcttctactgtattcccatcatacttaaaataaaatctaaaatctttactgtggcccagaaggctacacctgatctagccacttgctacctctcctacatcacttcctacccctctccctttcacgcacggctctccagctacattggcctccttgtcgttcgccagtcacatcagctatattcatttttactggaatgttcttcccccataactcacttcctcacttattcagtgttctgcctaaatgttacctcctcagagaggtcttacttaattcctcttctaataattgcacctgcccatccatatacccctatgcttctactttattttttcatagctcttaccattaactgatattacattacatgtttagttgtggggttgttttaccttatgacaagaatgtgtgtttcatgatgtcagatctgatgattttttaaatcaatttacattgtaactatgtcaatatgctgtgctgctctgtgaataaaaaatgggaacaatattgttgagggattttttaaaattgggagcaataaaacatctatttcacctttcatttcttgatattcatgtcaagttaaaatgtgactgttatagtaatgaccaggtaacttgatgtcatatcttataacccgaatatttttcaaggactctgtcatttctacacagctacatttccttggatgataaaatttgtacttgttgttcttgagattccgcatgtcacagtgatttctgcataaagtcacaagtctatggagtgcaccttacttgtacattactgaataacataatcttaagtaaatgagtagtatcattgatttaattaaagcaatatggtgtaatagaaaagccattgaaccaggagggagaaaatttgtgttctagttccaactctgccacctaccattttgtaaatttggatgtgtcacttaacctctctgagctttatatttttcataggtaataataactgacatttattaaatacctactgtgtaccaattattgtactaattgttttacttgcactgttttgtttaagcttcttcacaacccagtgtagtagagttcattcatattccaattttcaaataagatatggaaacacactgccagaaagtgatggaatggtattcatatccaggcagtctgcttttataatctatgctcttaacagccacaccatactgttccagtgtaatgtgaaataataacacctgacagggttgttgaaaggatcaagttaaatcatgaatatgaaagtactttgtaagctgtaaaatgtcatataaataaaaagtataaaataatatgcagtatagttagtatataaatatatgcaggaactgtgtgatttgggggaaattacatcatagctttcgtactttcattggtttcattttcacatttcttaagtgggggaaataacatacattatgcctctcataccaggttgataaggagtaaatgagataatatataaaaatatttttaaattgttaagctttatacaaatttaaaatattaataatgaagctaaatgatagccttcttgcagtataatatacactggaactatcttggaaccacacaagaaagtggctaaattgatcatttgaatttctggtctcaggaagattatgaagaagtaggaggtcatgttaatttggtgacttttttctgagctaaacagtgtattaacaaagataaactgctatgcttaggcagatcatgtagtgatgatattctcaaaatagtaatgacagaatctaatgcaagtcagcgtacatcatttttctgcaaaaaaaacaaagcatgaaagtgatattcacctgacccctttattctttcagtagtttccaaggtattcaaatggaccttatgaatttcctctttagcttcttatgttgtgtatttgtaggacctttaagagatccagattgggagctttcttaggatccttctggagaacattaagggcaatgggaaaaacactgaaaggtttaggaagtgcagtggcttaaatagacgtccattttagcctacagcatgaagaataaatagttgtctttctctagctcattaactagtctccttaagtaaatatgaggcctgccttttaagtcataagccatgaacaattttctgttttctaaatggcttgatatttaagctttgcgtttacagttaaagcttttaagatacacattctctgatatgtgctttattttgcacaaaataacttagagtaaaaataagtaagtgctgtttgggcttaacctccacattgtctatattatgcatataatatgattttctttcacaaagaacagaatgagaatcttagaacagaaatgagttgttataaaagtaatagattcctatcataataaaacttttcttcttttttttttctttttttttgagacagagtctcactctgttgcccaggcggtagtgcagtggcacgatcttggctcactgcaacctctacctcctgggttcaatgattctcatgcctcagcctcctgagtagctgggagtagaggcatgcaccaccacacccagctaatttttgtatttttaatagagatggcattttgccatgttggccaggctggtctcaaactcctggcctcaagcaatccgcctgcctcaagcctcccaaagtgctgggattacagacataggccaccatgctgggcctaaaacttttgcaatatggaatgactatagctatatctaatgtaaaagacctgagtacagttcatctactcacatgtgtctcagactgggagtgggaggttaaaaatcgtttgccacatttctaacctgaaggattccaattccaattcaataagtctggagtgggggctcagtatctgtcaattttgtaagagagcttgcatgtttgttttttccatgtcacaagtgatattactgtgtgcctagttaggaataattgctctgtaagggaaaaaagattttaaggttaaaaaaaaaaaaatcattgctctggtagaccagcatcatattataaaaatagagattttaaaaaattgaaactctcctcttctctggagagataacatatagtagaagagaaatttggatacgtttgagagcttactgtgttgttaagaaaaattagattctaatattattgatatgattgaaaagatttacttggttggagggtaatgagaatgtcacttgtttttggttgagtcaaatttatcttttgtaacctggttatagtatttaaattaaaatcaaaacctagattcaacagagatgattaaacacaagggactgcatctaggaatcatcttaggatgagtcgaagagccttaatattctcatagctagttatcaacacattctccagttattaaattttagcagaaagagtatgaatagagactctatttgtaaagaagttgaaaggcttcttttaaatttaacatttaaagatgttaaatttatcattagtgcgtcttcaagtaattttgctgctgatcacttaataattttaaaaacgataaaatgttggccgggtgtagtggctcacacctgtaatcccagcactttgggaggctgaggtgggaagtacacattcaggagttcaagaccagcttggccaagacagtgaaaccccgtctctactaaaactataaaaattagccaggcgtgatatttggcggctgtaatcccagctactcggaaggctgaggcaggagaatcacttgaacctgggcagcagaggttgcagtgagttgagattgtgccattgcactccagcctgaacgacacagtgaaactccatctcaaaaaaaaaaaaaaggataaaatgtttttagtgtttgaaaaaatatacttttattcactattgtagtaatttatttgtgtagaaagagttgaagaaaagtgaattgtcattaaattaggtaaatcagaatatattaccaccaacctttttagtaattattcattccttcacatcaaaacttaaaaagtaaatagcttcaagtgtaagaatcattcaggatacaaagtgatctcaggctgtaatgctgttacagagaagttatttaggtttgtattaaactaatattaattctgttttattagacaaacttttagaataaggcatttttctctgcattcatgtattgtctctggacagctgcctatgtatcgaaaagacacttccttgcattaagaactttatttcttcccagctgtagagattttttttttcccttccatctaaagaaaattattggctgggtccagtggctcatgcctgtaatcccagcactttgggaggttgaggcgggtggatcacctgaggtcaggagttcgagaccaccctggccaacatggtgaaaccccatctctactaaaaatacaaaactagccaggtgtgatggcgcatgcctataatcccagctatttgggaggctgaggcaggagaatcgcttgaacctgggaggtggaggttacagtgagccaagattgtgccattgcactccagcctgggcaacaagaatgaaactctgtctcaaaaaaaaaaaaaaaaaaaaagaaagaaagaaagaaaattattaacaaggcaaagttccaggtcttccaaaaagttttattgattgcaaggaaaacttgcaatagcagggagaacttgtgcttaataaaaaatttctctattctattaatgaatggcagtgatagggtacttgtcactggaaattttgtaggcagaaaaactggcaacagtctctgttaatgttaagttcatcaagtttcacattaatttgtagaccccaaagtccttatccgagaaagcaaaaacaaatagagcctaatagatgtaaaagctatgcatgtagttttttttttcatcaaagcatttattttatcttaaaatatactttaacagctgatcaggttatcttacttattcatgattccaatttttcagacctcagcaatcacccagcggataagtccttgttccactctgactagcagcactgcctctccaccagccagtagcccctgctctacactcccacccatcagtacaaatgcaactgccaaggactgcagctatggggctgttactagtccaacctctacccttgaaagcagagatagtggcatcattggtgagttggtttttatattgataattttgtgtcctttttttcctttttaaaataattacacaagcttaaggtttttaaaaattctgcttttgaattgttgagatgtatatataaaactttcctggtctttttaatgatgctggagagagaaacctaagggtaaacaaaatgaaaggtattcctccctacttaaccactccttatcaggatattccctgataagaaggagtggatttaaaaaaaaaacttctgtccacttcttcctgtaaatgcacgtacatcaactatctaccaacagaagtagttcagaaaaagttcattccttactggtatagtcgagagttttatgaaagaaaggtgagattagattaagtggcgaaagagttatgatttgagttgttctgggtctatttgtgcaaaccatatattagttatttaattagttttgggagcccctttagactttgtttttcttcttgtcaataagacagccctgttttttaccttctgcaaagtagaaaaatggtatttctttgcttatgatttgaaaccttatacgaatacatttttatggcaagcttgggcataaagagaacttgaaacttagaagtattcaagcaaagaaattttccatttaattttcccctcgtgaattttcttataccttttttttttttttttaccaaagatcctagttgactacttagtcctagaaatatttctaaataatcttcaacccaattagcagtttgcagcagaaactaaaaccactctgataaaggcaatgctgattgggacattatgtaatttattatctccggtagactctaggtaaacatttcatcagagccagacgtggactgttggagggctcattcatgttcaggagataggccatcatcatttatatgtattgttatgattcaacacctcttgctatgaaaatcataggatatttctagctcaggaaatctttcatcatattcaaaattttgagtgatctttcttgagtaatatttcctattaatgcattttgacaactagaaaatattaaagtattgtgattactctttgggacactgttctaatgctcttcttatagttaggtatggagataagaagagtaggggaagaacatagttctggagcttctcagtttttatggctatcaagttgtataatgattcagacattgaacattattctataccattgtcatttacaaaatgctaaaaaaattgcatttcctttaataatggagttaccaatagactccttttgacaaataagtctgtgtacattttctagtcagaaataagaatttaagaatagtataaaactatatatttatactctgtgagaagataaaatggaaattgggcttctgtccaaaacataaatggcatttctgggtattccttttctacctaacaaccagatgatgacagtgtcatagcctccagcagctttatgtagaataaagaagaggaaagaacataggtggtaataagaataattttaattaaaagttatttatggctaggtttctcttcagactcccaaaattatagtatatgccaaccccaattaagtatttaggagcagagcataaatggggaatgaatgtgttccatcatctatgatattgcacatgtgaatgtatgggcttatatttatacataggtagacaaaagtgattatgttttttcctctatcgctctgggccccaggtgcagagagctgaattaataatactcctcagtatatacagattggtctgtacaaagctcctctcagtttattacttttccctttatcctcaatcccatttcattgcagccatactattatatttatataagtccttgaatattaatgtgtccttgaatattatatgttgttttttgtgtgtgtttgtgattttaatttataaagtggcatgttaatacagatcttatattctgctttttaaaatctatatgaacaccaaatttcttgcttctgatgatgtaaatattcttcacattttacctgcgaacacttaggttgcttccaactcctctaccatttgtacaaaccttttctggagtttatacctaggactggaattaccgagtcatggggcatatgattatttaacttcatgaaatactcccagattattatccagaatagttacagtaattcacattctcatcagcagtatataaagcttcttttcccttttctcgttctttgttgacactagctagcccagttctaaaatctgaaaactcttaaaaccgtaagttttttaaaatataaatttacatcaaattcatttggctgtaaaatcttacctgagctaagatgaggctacttacagtctttatcctactaaatatgaatatctatacattttattgtagaaatgttaatatactcggttacaggatactattccctgtgccatatacagtatctgtgcctttttacttttttaaaatatgagacattctgtattttgaaacacatcttcagagtttcatatatgcgattatagacctgtgtcatctgactttctgattttagtaaatctgatggttataaaattgtctcattttaatatgcatttctttgattagtgtagaggttctgcagctcttcatatgctcactgcctattgtatacttgttaagggagtcattcaaatggaaataggtgaagttttgggaaaagaataatctaaagaaggcaaatccaaagagaagaaaacagaggactgagcacaaaatcttagagcacattcaaagagcagggaattggaagtgggagaagaatgagccagtggacaccaaaaaaaaagtagtcagataaataggagaaaacttagggcagtgcaatgccaccaaagccaagggagacacatgttccaaggaaggtgtgtggaaaggttgcttaacaaatgacgaaagttgagaagacaaaggaaaatgaggatgattaaagaataaaagtaaatatttttcccacatttggcttccttctgtagatataaaaaatacatatttatttgtttagaagttgtggcaaatgttaatgccgtgactgcaaagtgtatccctaacttacataaatgcacatcggtgtgtggattcattcattttaaataaatactgagtaaataaaaatatttttacagcaaagttgcaggatacaaaatcaacaccaaaacaagttgtatttgtatatcctaaagatgaaaaatccaaaaagaaaaataaggaaacagtttcattacagtggcatcacaaagaataaaataggaataaatttaaccaaggaggcaaaaaaaaaaaaattctacattgaaaactgcaaaacattgcagaagaaattttaagacttaaatggaaagatatactgtcttcatggattggaagacttgctattgttaagataacaatatttatcaaagccatctacagattcaaatcaatctctatcacaatcccaacagtagtctttgcagaaatagaaacatccagctgggaatagtggcgtgaacttgtagtcccagctccttgggaggctgaggcaggaggatcatttgagccaggagttcaagtccagcctggaaaacctagcgacactctgtttctaaaaaaaaaagaaagaaagaaagactcatcctaaagaagaaagaaagaaagactcatcctaaaagtcatatggaatcttaaaggactctaaatagccaaaacagtcttgaaaaagagcaaaattggacgactcacatttcctgatttcaaaacttattacaaagctacagtaatcaaagcagtataaagagaccagaaatagggggccaggtgcagtggctcatgcctgtaatcccagcactttgagaagccaaggcagacggatcagttgaggtcaggagtttgagaccagcctggccaacatggtgaaaccccatctccactagaaatacaaaaagtagccaggcgtggtagcaggagcctgtaattccagctactggggaggctgaggcaggagaatcacttgaacctgggaggcagaggttgcagtgagctgagatcaagccactgcactctagcctgggcaactgagcaagaccctgtctcaaaaataaataaataaatgaaaataaagagaccagaaataaactcttgcatatatggtcaaatggtttttgacaagcgtcctaagaccatgtggcatggacagtcttttcaacaattagcgttaggaaaattgaatattgacatgcaaaagaatgaagttggtcatttaccatctaccatatacaaaaattaaaatggattaaagacctaaacatagtagttaaaaactgtaaaactgctcaaaatttaaccaaggaggcaaaaaaaaaaaaaaaaaaaaaaaaaaaacctcatacaccgaaaactacaaaacattgcagaagacatttttaagacttaaatagaaagacatcctgtattcatggattggatataggagaggaacagagaacataggaggaaatctttggacattgcatttggtattgattccttggatatgaaccaaaagcacaggcaacagaagaaaataatacattggacttgacataaatttaaaacttttgtgcatcaaatgatactatcaagagagcaaaaaggccgggcactgtggctcacacctgtaactttgggacaggttacacaactttgggaagctgaggcaggtggatcacctgagctcaggagttcaagaccagcctggccaacatagcgagacccccatctctactaaagatataaaaattaggcatggtggcacaagcctgtaatcccacctactcaggaggcaggagaatcacttgaagccgggaagcagaggtggcagtgagctgagatcacaccactgcactccaacctgagtgacagagcaagacttcatctcaaaaagaaaaaaaagcaaaaagacaacccacagatattggaaataatgtatctgataagggattaatatccaaaatatataaagaacccctacaactcaacaacaacaaaccatttcaaaaatgggaaaaagacttacatagacgtttctccagagaagatatacaaatggccaatagacacatgaaaagatattcaacattactagtcattagggaaacgcaaaccaaaaccacaataaaacactactttatacccattaggatgacaattataaaaagaaagtggaacataacaagtgttggcaaggacgtggagaaattggaactctcatacattgctgctgggaatgtaaatgatgcagctgctgtggaaaagagtatggcagttctccaaaaagttcaacatagaattgccatatgatccggcaatttctcttctaagtatatacctgaaagtattgaaaggaaggatttggacagatacttgtatgctgatgttcatagtggcattttcacaacggccaaaaagtggaaataatacaaatgaatatggacagatgactggacaaacaaaatatgatatatacatgcaatgaaatattattcaccttaaaaagaaatgaaattctgatgtatgctacaacatggatgaactttgaaaatgttatgctgagttaagccagacacaaaaggattgtatgatatatatggttccactcatataaatggaataccagagtagctaaatcatagagacaaaaagtagaatagagagtactgagtggggctgcagcggcgtggggagttggtgggatgtggaaataggaagttattgtttaatggatacagaatttcagttggggatgatgaaaagttctagagatggataatgttgatgtttgtacaacattgtgaatatacttagtgcccctgaattatacacttaaaaatggctaaaataattttatgtcgtgtatattttaccacagtaaaacatttttaaaagaatatttattaatatgtatatggtatagacaataagaatatagcaaatacctgactacctctcttaccctataacaaaaatgacctgtcttatatgctaaagccttcttctgtatctcttcccatttctctattcataccctaccctgagaggtcatctgaattttgtgattatcattccagtactttctttcatgattttgccacatttgtatccctaaataatttattatttagatctcatgttttcaatttcatatacctgaaagcatatttatgcaaatttctttttttttccttttttttttttttttttttttgagacagagtctcgcactttcgcccaggctggagtgcggttgcgcagtctcggctcactgcaagctccacctcccgggttcatgccattctcctgcctcagcctcccgagtagctgggactacaggcacccgccaccacgcttggctaattttttgtatttttagtagagatggggtttcactgtgttagccaggatagtcttgatctcctgacctcgtgatccgcccgcctcagcctcccaaagtgctgggattacaggcatgagccaccacgctcagccacaaatttcttttgtgcttactgttatgtacctcagatacattcatgttgttgcattttagtctgcttgtttttattgccatatcatattctactgtatgaatatagcacatttgtttattcattctgttgatgaaaagttgagttgtttccagatttttgctcttgcaaatagtgctgctgtgattattcttgggcttgtgtcgttagtcatatgtatgattcggaatgttagaagtgaaattgtcagattattagaaatgtgtctctttcaactttataaaataatttcatcttttatgaaactataccagtttatactgccactagcaatatactataaaatgttccatttgctatagatctttcccatgtttgatattgtcaggcttcattttgccaatctggatgatatgaaagttatctaattgtgatattaatttgtgttttcttgattactgatgaggttaaacaatcttttcacatgtttattagccaattaggtttcctcttttgtgaaatacctgttcaagtttttgctcatttcctaatgtgatttttcttttccttacagatttgaaggaaatctttattttttaataggaagccttaattttaatgtagtcaagtttttttgttttttcctttgtattttatatttttgtgaaactttgctttgtcatttaagtccttaaaatcacctagaattggtacaagagtacaaatttatgtttttctatacaaataactagttccattaccatgttcgcatgcagtgtattgctgccaaaagcataaatgtctaggtctttttctgagcttttattctaggtctttttctgagcttttattcaatccattggtaaatcagtctctccttataacaatattgtactgtcttaattacaaccgctataagtcttgatacttggtaaacaaagtcccctaacttgatcatcatcttgaggattctcggctattctgtaccctttcttctcccaaataaacttaagaatcaatttgccaaattcatgaagaaccccttttgagatttttattagaattgcattgaaaccatagatcaatgagtgatgaatttacaactgtttccaatattaaatcttctaatccaggaatatattttttatctctttcatttagagcttctttagtatctttcaataaaatgttctaatttttcaatagggtctggtatatcctttcaaagatcttttttcctagatgctttatatttttatgcgtttgtcagtgttatgtctttttcattatacttcttacctattgcatagaaatatgtagagatttgtgtattgtattcagcactgcagcaaagtctcttattaaataatttatagtttttttgtggttttctacatatacaaccatattgtttgcaaataatgactttttatgttttccttacctatccttatatcatgtattatttattgattgattgatttcttcctaattttttttttcaatttttttgagacagagtctctctgtttcccaggctggagtgcagtgttgcaatcttagctcactgcaacctccacctcaaactcctgctgaagtgatcctccctcttcagtctcccaagcatctgggactacaggcgcatgccaccacacccagctaatttttgtatttttttttgtagagacaggattttaacatattgccgaggctggtcttgaactcctgggctcaagcagtccgcccgcctcagcctccaaaagtgctgggattacaggcatgagccactgcacccggccacactttttttttttccttgttgtaccagctaattctctggcacattgaattatagtgatggaagcagtcatctttatcttgtaactgatttttaaaggaatcctttttgtttgtttgtttgttttgtttgtttgttttgagatggagtctcacagtgtagcctgggctggagtgcagtggtgcaatctcagtttgctgcaacctccacctcccgagttcaagtgattctcctgcctcagcctcccgagtggctgggattacaggcacgcaccaccatgcctgtctaattttttgtttttttagtagagacagggtttccctatgttggccaggctggtctcgaactcctgacctcgtgatccacctgccttggcctcccaaagtgctgggattacaggcgtgagccactgctctcgggctaaaggaatgctttcagtatttcgctattaagtattatgttcctgtagatgtttgtagacatcattatcaggtttttaaaatgtttatttccagtttgttatgtatttttaaccataaacgaatattaatttttttcaaatacttttacaaatatcttttgaggtgatgaaatagtttttctcctttattctctcaatggtgtaaactacattaatttttcaaatgttaacctgattttgcattcctagaaccacgtgtagttatgatacatttttaaataaatcaacttattttctaacactttgtttaggatttttgaatctatatccatgagtgagatgtgcttgaaattctcctctctggttctgcaattgtcaggttttgctatcaaggattatgttagccttataaaataggttgagctcatccaaatataaatactccccaaggctgactctcagcctttctattgtcatctttctcagtctgctttccctgctgggatgactctctctgttccttgactcctatttcgtatttcgagctctgatttttggttccacaatttctctgtttattacattcttttcatcatggacacatgtccaggaataatcacacaaaccaaatcttactttcttcatgaagcagactctgattatccctcccttctctggatttccgcactatctacctccctcctctacacttatgagactcattgccaataaccagtatagttacttatagttatatatttattttctttatgtaagcttcttaatgtcaagatttatgtctcctactttttatttactctcgggatttagcataatatctaaattgtggtttatgtaagaagtctttatagggatataattattaaataactaaacattttgagtaaataacatagagcaacacaatgtgataaagagtaacctttttttctatcctctgaaatagtttgtggaagattggaattatctgtttcttgaatatttagtcagatttgctcttaaaataatcagggcactgtcttcatgcaataaatgcacatttcaattttaactactgtttctatgtattatgtttaatactatagaacattttaggttttctttttctttttgaatcagtttccttgtagtttttaatctttttaaaattttttagcataaaattatccaaaatatccttttataatggcatccctacctacccaggaacctaagacagatacctgagaggagcccttgcctcctccctctctttatatttctcatccctgtattttattttcatccttcatagcattgcttcaatggtcctcattatctcagacttagattaatacagatctttttgtctacttttcatcttgttctttctgttgtttttcactcagcaaccaaagtaaattaattgaaaatcaattactcatttgactcccggttacctaaaagataaagtgaacttcttgaaaacaaagtctgaccatatcactcttttggctctcatttgcctgtaagacttataggtaaatgaatttacattttgtagatcgataggcttcctttgacctaggccctcatgatctggtgatggccagtttccccagccttctctcccacttctttttgccttggatttattgttctagcggcaatagtttttttttcatttctgtgattttgttcataatgatcattcttactatgatatcctctctcctcccaacattagaggagataatagattatctcctctaatcttttatcgtaaatccagctgagaagtgttctgtcaccaccactactactcctcccacctttcctcagctctgcacttccaactgctattcaggacatattattactccactttcccagtaatacctgtgcctatctgtattattaaatttaacacatggtattatgcatagtttttgagtctacttttcccccattgactgttaatttcttgttagcagaaactgccatgttcattttttatctgtagcatttagtccagtgactggcacatggtagcatagtagatgctcaataaatgtataaaaagaaggaaagcttaatgatgggggaggagggaatgaaaggctcacctggcattttgttgtagttgttttgttttcttttattatactttaagttctagggtacatgtgcacaacatgcaggtctgttacataggtatacatgtgccgtgttggtttgctgcacccattaactcgtcatctacgttaggtatttctcctaatgctatccctcctccagccccccaccccacaacaggccccggtgtgtgatgttccccaccctgtgtccaagtgttctcattgttcagttcccacctatgagtgagaacatgcagtgtttggttttctgtccttgtgatagtttgctgagaacacctggcattttttaaattcattttttggcagtgcttagagtgactgttgggtacaagatgaaactttattggattttgaatgagattagaattctccattgactaactttgttctcttaagttctctatgattaattttggtaaaacgactttcataattcctgctgagcttcttcctgtgttcttttgatattattagattatctataattggatatcatctatattgccatacataaaaatagctatagaaatatgttcattcaagcagaaggaatggtgcttgaagaaatacctaggtggaaagacaagtgagccatgtaatgacagatatgtttggtttgtgcaaataatacaacaaaaatgcaaaataacatcagtgcttacattaggaaaatggaatgtcctcctgttctttgcttttattctgtttatttattattttatagaaacagggtctcactatattgcccaggctggtctttgaactcctggcctcaaacgatactcccacttcagcctctcaaagtgctgggattataggcatgagccaccgtgcccgaccctctttgcttttaaaagcccttcttactatgaaatgtagcacttaaataaggtccatagaccaaatgaataattgtgtctttgtgccacaaattaactcaaaactttctaccacctatcaggactactttcatcatttttattgatagatctcatgttttcaacaaatctgtcagcattactctattcattattcaatagttgctcatttttaatttatgagacatatatctgctaacacttatgttcaaaataaggtaactaatattgtcacccttgatataattctagctaagtttacagaggcttgatgttgtagttaactagtcaccaataaatatgtgattatttataaagtctatgaaatattgaaaatagtgaaacccattactaccctctcagacctttacaagtgtaatgtttcagtgtttggagcctaccgtatgtgctcatggtctgtcagagaaaagggctatgtttctggcatatataccagggttagaatacacagagacaagtacatcttagccaactgtgacatggtacctaaagacagaagcatctgctaggacacacaaagaaaacaccacaaaaggcaaggaattaaataacagacactttacacttagacaagtcctctgggaagcaggagcttgcattctctagctttcggtgtacaacccgtgtagccatgtaactccaagcttccaactaagaattacagagccagctgaccaaatgaaattatatttcagtcagattttagtgaatgaaaaagacttaagtatattttaataagacaacttccagaaatcaggataagtatacatttatttaaacaatacagacacataatataaatatatacaactatatactatcaatgaatacatttagaaataattataaaacatgctgtggaattcatacaaatctcattggggaaggtgcaacattgtatttggtggcaaaaagtttaagaaccattgggctattactgaaagactgaatatgtgaaatgaagttttcattaaaatgaatagttttggcaacatgctgaaataatatgataacttaataatgacttgaacatttaaattagctttaagaatatctagcccctggttcccaacattttcagcaccaggactgccttagcatatatttcttagaaaacagagcctgagacaaaagtttatatgttaagacctttttaacagagtacaagccagggaagcaagcgtgaaggaaagggggagtgagacaggaaaggaaagagaaaaaatgtaagggaagatactacagagctggcagaggtgagagaccacatgtctctgaaccatggaaaggagactccaaagaggatttttctgctaactcccttcctgtattggtcacagcctggtgagtattatctcccttattctccctattgcacaaaaccagtagccctactatatcttatgtctcagtgacaatagagaagtccagggacagaggagacagactgtatagcatgcacatgaggtaaggtattgattgacttgtgcccaggatcaacacaaatgactcggagcagcccttgtagccaatccctcagtctgaagccagaggcattagtaacacagacctaactccaacccatgagaattgttcaaatcgttgtgaaggccactttggccaaacaactggcaggtgactatatctaggattctgctttagtccattcaaatggctataacaaattattttagcttgggtaatttacaagcaattgacatttattactcacagttctggaggctgggaagtccaagatcaaggcaccagcagatttgatatctggtgagggctcatcccttgtagctgaagcctttgctgtggcttcacatggctgaagaggcagacatgcttcctcaggcctgttttatacaggtactaatcccatttgtgaggacctaatcaacccccaaaggccagaacctttaatactatcacattggagattgtaagtttcaacacatgaatttgctgggggacacaaacattcagagaatagcagatgccaaacccagtacagtccaacccttgtaccacattgatccagtagtatcctctgagtatctggtctcaccctgggaagatgatgcaatgatgctctcaattctttcctgagagggtaggttctaaatccagtccttcaagttggtagtcagttgtaacctcccaaaaagccttagaaagggttagtaaacaaagatttaggtccttgctgctccatgtagtcctagagaccataatgcatgctcattatttccctctacccatttcagaacaaaaaatgtcaaaatagatttaagaacaggaatgatctacaattgaaagtcgtttcataatgatgaatggatcagtttatcaagaggaaataacctaaatgtttatgcaactaacagaacttcaaaatgagagaaatccataatcagatttcagcattcatctctcagtagctgatagaacaagtagagaaccaattaacatatagaggatctaaaccattccatcaaccaacttgacctaatcgtcttttattgaacaatgtgataataaaaaatatgtctatttggtctttgtccctggttcctgacacagggttcctaaatacctttgaattttccgagtcataggagcatcttggcaggcccctagatagcttcaggatagggaatggtcaccagaaagaccagggaatgactacggttacacttttagccccactccagacttcagggaggggagagaggctagagattgagttaatcaacagtgaccaattatttaatcatgcctaagtagtgaaacctccattttaaaaacaccctaaatgatggggtacagagagcctctggattaatgaacacaccaaggtactggaaaaggcatgccaggaaaagggatggaggtgccacacttttattttattttattttgttttgttttgttttgttttatttttattttattattattttttttttctgagacggagtctcactctgttgcccaggctggagttcagtggtgtggtatcagctcactgcaagctccacctcctgggttcacgccattctcctgcctcagcctcccgagtagctgggactacaggcgtccgccaccacgcccagctaattttttgtattttgttagtagagatggggtttcaccgtgttagccaggatggtctcaatctcctgacctcatgatctgcctgccttggcctcccaaagtgctgggattatgggcatgagccaccgctcctggcctattttattttattttgagacacggtcttgctctgttgcccaagctggagtgcaatggtgcgatctcggctcactgcagcctccacctgctgggtttaagtgattctcatgcctcagcctctggagtagctgggatcacaggcacgtgccataacacccagctaatttttgtatttttagtagagacggggtttcaccatgttggccaggctggtctggaactcctgacctcaagtgatccacccatctcggcctcccaaagtgctgggattacaggcctgagccaccatgcccggccagctccacacactttcatacctgccctctgcccctcttccatttggttattcctgagttgtaccctttataataaaacagtaatagtaagtaaagtgcattcctgagtcctgtgaaccattccagcaaattattgaactcgaggaggttgtgtgaatccccactctatagccaattggtcagaaatacagatgacaacctgggacttgcagctggcatgcaaagtgaggacagccttgtggaagtaagcccttaacctgtggagtctgtgctaactctgggtagttagtgttagaattcatatgaatcgtagggcaccagttggtgtccagataattggcaaattgattgttgggtggcagcaaaaactcacacatatggtatcagaagtgttgtgagtaaaaatatttcagtggtccacccaaaaacagcagagtacagattcctttttagaaggttcaccaagacataccatattctggtctgtaagacaagtctcaataaacttaagtggactcaaactaaacaatgttctctgaccacagcatgattaaactagaaatcagtaatagaaaaatatcaggaaatttcacaaatctttggaaattaaataacacatttctaaataatgctccagtcaaaagaaggtggaaatttaacaatattttaaattaaatatcagtgaaaacaaaacatatcaaaatttgtggaatatacctaaagaagagcttaggaggaaatttatagcattaagagctttttttagaaagcaagtttttaaatcaatgaactgaatttccagttaaactagaaaaataagaagttcaaccgaatgtaagcagaaggtaggaaatcatacagagcagagatcagttaaatagaaaacagtggagaaaaacaatgaattaaaagctggtgctttgagaaaatcagtaaaatcaataaacctctacctgtactgactaggacaaaaaaagaagatacaaattaccgctattaagggtgaggtagggacattattacaggccccactgacattaaaagaatactaaaggaatgtcacaaacaattttattttttaaatttatttttctttttctctacactgggaagaaacttaaatgaacaattttaatgtcagtaaatttgacaatttagattaaatggacaagttcattgaaataaataaactatcagagcttacttgataagaaagaacctgaatagctgtattgaatttgttgtttaaaactttgccataaggaaaacttttggtccagattcattgacaggtaaattcaaccaaacatttaaagaagagtgataccatttctacacagactcctccaggaagttaaagaggaacaactaggaggccaatattgttaccctaagaacaaaccagacaaagacatgacatgaacaggagagtacagaccaattatctctcatgaatgcagagttcttaacaaaattctaacaaactgaatctaataatatataaaaaggataatgtctcattactaatgggttttataccaggaattgaggttgtttctacattcacgaatcaatcagtgtagttaatcattaataacagactaaaaaagaaaaactgtatgatcatctgataaatacaaaaaaaaaacagcattggttaggcacggtggctcacgccgtaataccagcactttgggaggtcgaggtaggaggatcacttgaggccagaagttcgagagttgcctgggcaacatagtgagatcctgtctctacaaaagtttttagaaattagccaggtgtgatggtacacacttgtagtcttagttacccaggaggcttgatcccaggagttcgaggctgcagtgagctgtgatcatgccactgcactccagcctgggtaacacagcaagaccccatagagaggagggaaaaaaaaaatcgacaaaaagttaaaagtaggaatggatgaaaaatttttaaatttgataaagggtaactgaaaaacctacatctaattcatacttaatggtaaaaacctggatgctttcccttgaaaatcatgaacaagacagatttctacacctatcacttttattcaatattatgttggcagtctcaatcagtgaaataagatgaataaagtaagtaaataaaaggcatctagattagaaaggaaaaagtagaactgtcactatttccagacatgatactctgtgtataaagtttaagaaatctaccaaaaataactattagaaactagtgagttagctggacacggtggctcacccctgtaatcccagtactttgggaggctgaggcaggtggatagcctgaagtcaggagttcgagaccagcctggccaacatggcgaaacctcctttctactaaaaatgcaaaaattagctgggtatggtggtagacacctgtaatgctagctaagggaggctgagacaggagaatcgctagaacccaggagacagaggtttcagtgagctgagatcacgccacttcactgcagcctgggcaacaagagcgagactccatctcaaaaaagaaaaaaaaatagtaagtttagcaaagtctcaaggtgtaggatcaatatgcaaaaaagtattgtatttctctgtaccagcaacaaaaaaaatggaaattgaaataaaagggtcatttacaaagcactaaattgtggaataattagagataaattaaaaaatacatgacctgcacagtgaaaagtgcaaaacatgctgagcaaaattaacaaagatatgtgggaaaatataccatgttcaaagatcacagtactccatactgttaagatgtcaattctttctaaattgatctattccaggggttggtaaaccatggcaggcaggccaaatctggctacccacgtgtttgtctcctgaaagctaagaatgatttctatatttttaaatggtcacattttaaattattatataaataataatatgtaacaaattattgtaacatccagatatgtaacatttgtaacatccagatatgtaacaatctggatgttgcctactggcccacaaagcccaaaacatttactatatagctccctaagaaaaagtttttcaattcctcgtctatacattcagtgcaatcccaaacaaaatccctccacctcccaggttcaaacagttctcctgtctcagcctcccgagtagctgggactacaggcacatgccaccatgcccggctaattttttgtatttttagtagagacggggtttccccatattggtcggttgttcttgaactcctgaccttaggtgatccacccacctcagcctcccaaagtgctgggattacaggcatgagccatcacacccagcccaccatggtttttagtataaattaacaagctagcactgtatacctatgtaacaaacctgcatgttctgcacatatatccatttttttagaagaaataaaagcaaaaattaaaaaaaaagaaattaacgacctgatattatcatttgtatggagttagattagccagaacaaattttgaaaaagaacaaagttggaggatttatactacctgatttgaggtttactataaaactgcagaattcaaaacagtgtgttactgctgtaaaggtggacaatggaaccacataaagagtccaaaaataggctgagcacagtggctcacacctgtagtcccaacactgtgggaggtcgaggtgggtggatcaccggaggtcaggcattcgagaccagcctggccaacatggtgaaacctctcctctactaaaaatacaaaaattagtggggcatggtgtcacgtgcctgtaatcccagctactcaggaggctgaggcaggagaatcgcttgaacccaggaggcagaggttgcagggagccaagatcgtgccattgcactccaacctgggtgacagagcaagactccgtctcataaaaaaaaaaaaagtccaaaaatagacccacacatacactagcaactcatttttgacaaaggaatcaaggcattttagtgagaaaaggctatttttttcagcaaatattaatattacagaataggctgggcacggtggctcatgtctgtaatctcagcactttgggaggctgaggtgggcagatcacttgaggtcaggagttcgagaccagcctggccagcatggtgaaaccccgtctctactaaaaatacaaaaaaattagccaggtgtggtagcgcgtgtctctagtcccagctacctgggaggctgtggcaggcgaattgcttcaacccgtgaggcggaggttgcagtgagctgagatcgcgccactgcactccagcctgggcaacagagcaagaatcagtctcaaaaaaaaaaaaaaaaatatatatatatatatatgtatatatatatgtgtatatacgtgtatgtgtatatatacatgtatgtgtatatatgtatatatacgtgtatatgtatatatacgtgtatatgtatatatgtgtgtatatacgtatatacgtatatatgtacgtatacatcagaatatttgcatatccatacacaaaagaaaaaacagtttgtctttaccctaccccacatacaaaaattcaacgtggatcatagacttaaacctaagagctaaaattataaaactgcaagaagaaataatagatttaacataagcctaagtaaccttgtgttaggcaaaaatttttaaaattgaacacaatcattaaccctaaaagaaaaataactgatgtttgactgccaaaatttaaaatatttactcctcaaaagttattaagaaaatgaaaaaggcctggcacggtggctcaagcctgtaatcttggcactttgggaggccgaggcaggcaggaggtcaggagttcaagaccagcctggccaacatggcaaaaccctgtctctactaaaaaaaataaaaaaattagccaggcgtggtggtggtggtggtgtgtgcctgtaatcccagctacttgggaggctgagactggagaattgcttgaacctgggaggcagaggttgcagtgagccaagatcatgccactgcactctagcctgggcaacagagtgagactccatctcaaaaaaaaaaaaaaaaaagaaagaaaatgaaaagggaaattatagatgaagagaaaatttttcaaacacttatctcataaaagagttctattcagaataagtgaagaatcctcacagcttaatataaaggcatacaacttgaatttcaataaaatgagcaagcgatttgaacagatacttcacagatgaaagcatatgaataacaagagatagatgttcaatatcaataatcattaggaaaatgtaaattaaaaccataattggatatcactgtatacctagtacaatgtctaaaactcaataccaaagattggcaaaaatgtgggagcagttggaattttcagacactgctggtgtgagtgtaaaatggtacagccactttgaaaactccttaggcattcttttataaagttcaacaaaaatctgccatttgacctagccatgctattcctaggtatgtacaagagagcaagaaaatcatatgtctacgcaaagaccagtagttgaatattcagagcagctttattcatgatggctgaggtcttagtccatttgggctgataaaacaaaattccataaactggatagcttataaacaatagaaatatatttctcacagttctgaagaatgggaagtcctggatcaaggcagattcagtgtctggtgaaggccaacttcctgtttcgtagacagcatcatcctcacatgatggaaagggtgaggaagcttttttggtacacttatattggtggatcaaccccactcaggaccaaatcacttcccaaaggccctacctcctaataccatcaccttgggggttagaatttcaatgtatgagttttaggagacacaagcatacagaccatagcagctgaaaacttgaaacaactcagatgccatcaaactagcaaatgtataaatactgtgatatatcaatttttaaaaaatggaatgaactactaatacaacatcatggataaatgttaaaagcattttgctacataaaacaagcttgaaacaaaagactgcatactgtatgattctatttgtgtgaaattctacaaaaggcaaaactataatgatagcaaatcagcagttgccaaggtgtagagtggtgggtaaaggtgtaggattgaccgcaaaatgttaggaggcaactgtatgggatgatggaaagttgattacagcataactggatacatttgtcaaaactgcatttttttacttaaagtatgaatcttattgtatgtaaattataccttaataaaactgattaaacacacacacacacacacacacacacacatacacactagcatgacacagctattttactcctaggcataggcccaaatgaattgaaaacaggtagtcaaacagatactacatgaatgttcccagcagcagtattcacagtagccaaaaggtggcaacaatccaaatgcccacccacagatgaatggataaacacatgtggcatatacacaatggaaacttactcagtgatgaaaaggtatgacacactgatacatgctactgcaacattggcgaatctcagaaacatgctaagtgaaagaagccagacacaaaaggccaaatattatgtattcccttcttagtagatatttagaatatgtaaatttatagagacaaaatgcagactagtggttgatttgagggggtgggcatgatagtaactgcttaatgggtatgaagttttcttttggagctgaatagaggtgatggttgcacaacattgggaatgtactagatgccattgaatttgttcactttgatgcaggtgcaccccaaaattagagcttagcccaagaaggttcttggcttctctcaagaaagagttcaagagtgagccgacagtgaaagaaagcaggtttattagagcaatagtatatagcaaaatggttgctccatagagagagcagggctatcccataggcagaggagcccagaggagcagagtacagcaaagtggctgctccacaggcagagcagcccggaggagcacagcagcagtgtatggcaacagtagcagtccgaagcaggagcaacagcagacacagctgcagtgtacattgctggttagctatatctgtacccactcttaattattttatatatagtgtatatatatatatatatttaagggacagagtgttaagacttttctagaaaaggggcaaggagttcctgaaaccatagaaggtaactttcaggtcattgccctagtgcgttgccatggcatttgtaaactgtcatggcggcagtggagtgtctttaataacgagcagtgagggcaagcagaggtcatcttcgtcaccctcttctgatttgggccattttctttactgcatcctgtgtttaatcatcaggttcattacaggtgggtgctgatctcctacctcaactttaaagtgggtagctttatgttatgtgtattttacctcaagcacacatacatagttaacctaacacatagccacaattttctttgggtgagaatcagaggaatattttactacagtggcattgcaaagcccttgcccaaagagctccaacttccttttcaatcctagaccagtgaattctggtctgtgaactaatttagatctgaaacctaagggactgccattttccactatgcctgatgttagcctctttttaaaaaataaagtaagcagcatcctaatctgttcaaccatcttgccactagaaacattgtcatctgttaaccatcaccactgatgcttttagtcaaagcaccctggttgctctcccagacttgctgatttttttttttttttttttgagacggggtctccctgtgtcgcccaggctggggtgcagtggtgtgatcttggctcactgcagcctccgcctcccagattcaagcagttcttccacctccgtctcccaagtagctggaattacaggggcgcaccaccacgcccagctaatttttgcatttttaggagagacgaggtttcaccgtgttggccacggtggtctcaaactcctgacttcaggtgatccacccaaagtgctgggattacaggcgtgagccaccacacccgtcccagccttgctgatctttacaataatatatcctccttgcatctgagaaatacgtgctgccaactggcctctgtatcctcactgatattagagaccccagttctatgataacatctccctattaactgcacttagagaggatggtcaccttcaggcttttcaaagatgtcagtgttccccaccactgccaccagtacatttctcattgccttagtgaaaggagtgtccattaggcctccagggagtggagagaggtcatggtattattggtcttatgtggtagtcccttctaatctccaccaccatgaatcttctgactcatttgtcagtactatgcccaggaagttctagctgatcatctcaggctgatttcctataggccatcatcatatccaggtttgaaggaaccatcctcatatagatctcctttgtctcctatatctttttttctgcctattttattccattttaattaggatttaaacatgatcaagtctttttgcatcttctatctccctctacccttcacagacccattgaaagaattgttctcaccttttcttaatttcatctccctctcactttggaaccattgacattccagtttctgcctatactactcacccaaggtattatctagatcacctccatatagatcgagccaataatgattgttagttcttattacagttaatgttttctgacgcatgtttactttttgaaactctctcttgcctgacttgcccacagtctccttgttttcctcttctttctggttgttctttcttagactcctttgcaggctcttcttgctttgcctaattgtgtttcaacgggtgtcattttaggccttcctctcccctcactctacaaacttcttaagagacaatagtcagctcctaaggttaataactttgacatctgactctctattctcctgagcttcagtttaattatctcactgtctactgtacatctttatttgaatgccccatagacacttcaaattctacatattcctgagctaaatttatgttcctcttaatcctgcttctcttcctgtattccctaagtagatggtaccaccatctagccatttgccccagccagaaaccaggatattattcatgactgcatttttacctcattctttacatctaatcaaattatcaagtccattcattatttttcatctcctttgtcatttcttaatacaggtcaatatttctaactcggattgctataaaacctaacttttctgtttgccttcaatcaggtaatcctctgacacaggagatcatgaatttggattgtaaaaaaagattacgttttcattttttgatttctaattgaaatttagaacttctattttgaatgtaggtaacaaaccacagaagcactagaagtttttgtgactttgtcaccaataaatacctcagatattttcatgttacttgtaggtatcataaaatatcacacttgtcaccaccttgaaaatatagtagacttgcactagatcttatcacttaatgttaatgaaactcacaaattactgtgtcacaaatctattttttattattttgattactgtttttcaaaataattgatttctcctgtttttgcattttatttcatgcatttagaaatattatggaaagagtctttttaggcatcaccagacaccatagggggtctgtggcaacaccttactgtaatgtattctactcactagaaccaaagtaatctttccaaaatgtaagtttaattatgtccctcaaaagcctttaatcatgtgcctcggttgcccttaggagaaaccgggataaaatctaatccctttaatatggcttacgagttctagtctgatctggactctgtctcctctctgtcattctagccagtggtgtgctgtggccagctagcacctgcaagattcagtttttaagattttggtaattttgtgagccagttaagtcataggtagcttgagtgtacatttataccacggagatcagcaaacactgcaaatcagaattttgttttgtttttgtcttttattttttaatttaattttttaaaaatttccaggatacacatgcaggatgtgcaggttttttacgtagggaaatgtgtggtagcaatttgctccacctatcaacccgtcacctaggtattaagccctgcatgcattagctatttatcctgattctcttcctcccctcaccttccctgacaggccccagtggtggtgttcccctccttgtgtccatatgttctcattgttccactcccacttataagtgagaacatgcaatgtttggttttctattcctgtgttagtttgcttaggataatggctttgagctgcatccatgtccctacaaatgacatgatgtcattcctttttatggctgcatagtattccatggtgtatatgtaccacattttctttatctagtctatcatttatgggtgtttgggtttattccatatctttgctattgtgaatagtgctgcaatgaacatatgtgtgtatgtatctttataatataataatttatattcctttgggtatatacccagtaataggattgctgggccaaatagtatttccagttctaggtctttgaggaattgccacactgtcttccacaatggttgaactaatttacattcccaccaatagtgtaaaagtattcctgtttctgcacagccttgccagtgtctgttgtttcttgactttttaataatcaccattcagactggcatgagatggtatctcattgtggttttgatttgcatttctctaatgatcaatgatgttgagcttttttcatacgttggctgcataaatgtcttcttttgagaagtgtctgtttatgtcctttgcccagtttttaataggattgtttgtttttgttttattttttgtaaatttgcttaagttccttgtagattctggacattagatcttttttcagatggatagattacaaaaactttctcccattctataggttgtcagttcactctgatgatagtttctttcgctgtgcaaaagctctttagtttaattagatgccatttgttaattttggcttttattgcaattgcttttgatgttttcatcatgaaatctttacccatgcctatgtcttgaatggtattgcctagattttattctagggtttttattgttttgggttttacatttaagtctttaattcatcttgttaatttttgtataaggtataaggaaggggtccagttttagttttctgcatatggctagccaattctcccagcaccatttatttatttatttttcatttatttattttttttgagacagagttttgttctgtcacccaggccggagtgcagtgctgcaatctcggctcacggcaacctccgcctcctggattcaagcgatgctcctgcctcagccttccaggtagctgggattacaagtgtgcaccaccatgcccagctaatttttgtatttttagtagagacgggtttcactgtgttggccaggctggtctcaaactcctgacctcaagtgatcctcctgcctcagcctcccaaagtgctaggattacaggtgtgagccaccatgcccagccccagcaccatttattaagtaggaaagcctttccccattacttgtttttgttaggtttgtcaaaaatcagatgattgtagatgtgtggtcttcatttgtgagatctctattctgttccatggtctatgtgtctgtttttgtactagtaccatgctgttttggttactgtagccgtctactatagtttgaagtcaggtagcatgatgcctccagctttgttccttttgcttaggattgccttggctatacgggctctttgttggttccatatgaattttaaagtagttttttctaattctttgaagaatgtcagtgatagtttaatgggaatgggtttgaatctataaattactttgggcagtatggctattttcacaatgttgattcttcctatccatgagcatggaatgtttttccatttgtttgtgtcttctctcatttccttgagcagtggtttgtagttctccttgaagaggtccttcactcctcttgttagcggtgttcctaggtattttattctctttgtagcaattttgaatgggagtttattcatgatttggctctctgcttgtctgttgttagtgtgtaggactgcttgtgatttttgcacattgattttatatcctgagaccttgctgaagttgtttatcagcttaagaagctttggggctgagataatgggattttctagatataggatcatgtcatttgcacacagacagtttgacttcctctcttcctatttgaatatgctttatttctttctcttgcctgattgccctggccagagcttccaatactatgttgaataggagtagtgagagagggcatccttgtcttgtgccggttttcaaggaaaatgcttccagctcttccccattcattatgatattggccatgggtttgcataaatggttcttactattttgagatatgttccatcaatagctagtttatcgagagttttctacatgaagggatgttgaattttatggaaggccttttctacgtctattgaaatgatcatgtggtttttgtctttccttctctttgtgtgatgaattacgtttatggatttgtgtatgttgaaccagccttgcaccccagggatgaagccaacttgatcgtagctaagttttttgatgtgctgctggattggtttgccagtattttttgaggatttttccgtcaatatgcatcagggatattgggctgaagttttcttttttgttgtatccctgccaggttgtggtatcagaatgatgctggcctcataaaatgagttagggaggagtcccttcttttcagttgtttggaatagtttcagaacaaacagtaccagcaactctttatacctctgatagaattcagctataaatccgtctggtcctgggttttttttttttttttggttggtaggctatttattactataggctatttattactgcctcaatttcagaacttgttattggtctattcagggattcaacatcttcctggttcagtcttgggagggtgtatgtgtccaggaatttatccattttttctagattttctagtttatttgcatagaggtctttatagtattctctaatgattgtttgtatttttttttttttttttgagaaagaatctcactctgttgcccaggctggagtgtattggtgtgatctcagctcactacaacctctgccctctgggttgaagtgattttcatgtctcagcctcaagcgattttcatgcctcagcctcctgagtagctgggattacaggtgtgtcccaccatgcccagctaatttttttgtatttttagcagagactggattttgccatgttggccagcctggtctcaaactcctgaccttaagtgatcctttcacctcaacctcccaaagtgatgggattactggtgtgagccaccgtacctggcccagttgtttgtatttctgtggggtcagtggtgatatcccttttatcattttttattgtgtctatttgattcttctctcttctttattagtccagttagcagtccatccattttattaatttttttcaaaaaaacagctcctggatttgttgattttttttgaagggttttttgtgtctctgtctccctcagttctgctgtaatcttggttatttcttgtcttctggtagctttggggtttctttgctcttggttctctagttcttttagttgtgatgttagggtatcgatttgagatctttctagctttcgatgtgggcatttagtgctgtaaatttccctccaaacactgctttagctgtgtcccagagattctggtacattgcctgtttgttatcattggtttcaaatagcttcttgatttctgtcttaatttctttatttacccaggagtcattcaggagcaggttgttcaatttccatgtagttgtgtggtttggagtgagtttcttaatcttgagttctaatttggttgtgctgtttgttatgatttcagctcttttgcatttcctgaggagtgtttgacttccatttatgtgatcaattttacagtaagtgccaggtggtgccaagaagaatgtatattctgttgtttttgggtggagagttctgtagctatctatcagatccactttatccagagctgagttccagtcttgaatatctgttaattttctgtcttgattatctgtctaatattgacattgggtgttaaagtctcccactattattgtgtaggagtctaagtctctttgtaggtctctaagaacttgttttatgaatctgggtgctcctgtattgggtgcatatatatttagtatagttagctcttactgttgaattgtcccctttactattatgtaatgcccttctttgtctttttttaaatctttgttggtttaaagtctgttttgtcagagactaggattgcaacccctgcttttttctgctttccatttgcttggtaagtttccctccatccctttattttgagcctatgtgtgtctttgcatttgagatgggtctcttgaatacagcataccaaggggtctttacccagcttgccactctgtcttttaattgggccatttagtccatttacatttaaggttaatattgctgtgtgtgaatttgatcctgtcatcatgatgctagctggttattttgcaggcttgttgatgtagttgcttcatggtactattagtctttgtacttcagtgtgtttttatagtgactggtaacatttttttccttcccatatttagtgcttccttcaggagctcttgcaaggcaggcctggtggtgacaaattcctgcagcatttgcttgtctgaaaaggattttatttctccttcgcttatgaagcttagtttggccacatatgaacttctggattggaaattcttttctttaagaatgttgaatattggtcccgaatctcttttggtttgtaggatttctgctgagaagtccacggttagtctgatgggtttccctttataggtggcctggcctttctctctggctgcccttaatgtattttacttcattttgaccttggggaatctgattattatgtgtctttgggttgatcttctcatggagtatcttactgtggttctctgtatttactgaatttgaatgttagcttgtcttgttaggttggggaagttctcctggatgatatcctgaagtatgttttccaacttggttccattctccctgtctcaggtaccctagtcagtcataggtttggtctttttacataatcccatagttcctggagattttgttcattccttttcatcttcttttctctaatcttttctgcctgtcttatttcagcaagttagtcttcaggctctgaaattctttcctccactttgtctacttggttgttgatacttgtagttacattgtgaagttcttgttttgtgcttttcagctctatcaggtcatttatggtcctgtctcaactggttattctggttaacagctcctgtaatgttttatcatggttctcagcttctttgcattgggttagaacatgctccttcagctctgtgaagttattacccaccttctgaagtctacttctgtcaattcatccatctcagcctctgcccaattctgtgccctttgctggagaggtgttgcaatcatttgaaggagaagagcactctggctttttcagttttcagaattttttcattgattctttctcatcttcgtgagttcgtctagcttcaatctttgaggctgctgacctttggatggggtttttgtggggacattttttgctaatgctgttgttgttgctttctgttatttgtttttcttttaacagtctccttccatagggctgctgcagtttgctgggggtccatcccatcctgttcacctgggtccctcctacaactggaggtgtcaccagtggaggctgcagaacagcaaagatggctgcctgcttcttcctctaggagctccatcccagaggggcactgacccgatgtcagcgggaaccctcctgtataaggtgtctggcgacccctgttgggggttctcacccagtcaggaggcaggggatcagggacctggttaacaaagcactctggctgccccttgggcagagggggtgcactgcactggggggaatcccacttgtctggactacccggattcctcagagccagcagcgggaaagactaagtccgctgatcaaccgagactgcggctgcaactgcggctgcctctccttctggggagatcagagttctgttcgtaaacctctggctggagttactgaaattcccacaggggagccccagccagtgaggagggatgggtcagggtctggtctaaaaaggcagtctggccacaatctgccacagttgctgtgctgcactgtggggaattcttcctgggtctaaaccgcccagtctccctggcaccagtaggggaaaaacagcagactggagctgcagtgatggctgctgcccctcttcccaggagctcagtcatcttaggtaggaggcagccacagtcatgatggccacccctccccctgggaactcggtagtcttaggcagtttccagccaagaggccgccgtagtcttaggcagtttccagccaagaggccgccgagaatctgcacagctctgtgcttgggacccaaaccctggtggtgtgtgtgggcccacgagggggatctcctgatctgtgggttgcacagatccatggaaaaaccgtggatcgtggattcttgggcagggtaacacaatcactcactaccacctcccttggctgggggtgggagctccccttgccctgtgtggctcctgagtgggccatggctccaccctgctttttccttgctctccatggctcacgccaactgcctagtcagtcccaataagagaacctggatacctcagttgccagtgcaggattcactcaccattttcattcttctgtgtgagagcctccaaacgcatatatttctcgtcagccatcttggcccctccggcctgttgttgttttttagagagccaagatgttaaacttgtaccagcacaccactggccccaacccacctccaaagttttagtctattgaatttacttaattcttacgaactttgctgtgcccttgtgaatgtttttgtctttggataaaccattgttttttcgtctttacctgaccaactcaacttggtcgacaagagtattctctagccctcaagtctgggttagatttctgtctcctttctcataaagcaaacctctttttccaacaggtaaagtaaaataaagtaaattaagtaaagataaaagaccaaatttaggtgaatgtgaagttgttatctggaatgactgggagttgggtaggtattgcaaggacttttattgaagtccttgaccattattgaagatgcagtcttctcaagagctaatagttcagtacctatttaattgtttcacagtatcctaaaatattatagaaagcctgattgatctcttgcacctattcccctaccacaaatataaagccttttccacattaagagtacagtactatattcctagcagacataaacacttcaccaatactgaatccattcttcagagcttagcttatgtgtctttaaatactatgtcctctcattacattttttccctaaaagtaggcagtttcttggcttaaataatttcccagataacatatacactcatatcattggtaacaatatttttaatgtaagtagtagtaaaaaatgccctgaagaatgaggccgattattttcgttctgatatttcattgttaatgtctgcagtgtccttctgtgctgagggtctcctgaatgttcactgcatgctattttcctatgacttttgtagagaacagcagggctttagcctctgtgctttcctttgttttatctctcctatcatcatgtgggcattacagagctgggtgctaaaagttttttttttaatttaaatatgaaaaaacccttaaaatatagtttctactctccagaaatgtacagtgtagtaaaggaggcaaggtacatctacaaaagagttaaggaacaacataagatagtaaatgattaagattccaagtaattagttgcctgtgagactacttgttagctatataagtgggcaagatgcctaatctgcacattggtttggtttcctcatctgcataatgaagatagtaatatcagtcccgcttagagtgttctgttgataattgaatgagttactgtatctcatggtacaatttaaaggttataaggtgataagtatgaatttattatgattactagtattaaagcttatgatctaatacagaagaaagaatatcttgcttaaaatgtatatgagctttttctgaggtgattttttttttaccagttatcaaaaaaatcactttggcctttgagttgttaggcccctggagttacttttcaattctttatttgttttccatgttcttcctttggaaagattttctgagtttcagaaactgttttccagatttgctaccacatactatccttggttttttgtccccaaagaccagccaaaatgtaggaatataattttctctgctttctttttgttagctgtctttccaaaatgagcataggttgtctattttttaagattttacaactaatcactaaaggggaaatagagtataataaatacgggaacttatcttccaaaatctcataaggtttccaaagggttctgtgatatttctgatttcctttctcaggtggagcccaaaagcacataccctcatctctcttttaattcttaagtttataaaattttccctcttcccacttctctacctttttctagtttacttagatttcttcttccttagccttttactttttgtgacaacaaagtcagattttctttcttagagagaaatttaggtcatcctttataattcatcttcttcccgtgttattagaaaatccagaactccatttaaatttgcagagagagaacctcactaaaaacgattgtggaaattacctcatgagcttaggtctcttcttttggcaataggtacattcaaaatataagaagagaaaatgaactaacatataaaaactcctctgggatgatatcttttattcttgttttataattattgctaaaaaattataatctagatgttaatgtttttaatcctttcatttctagcattaattaaaatttttctatttgtgtataattagtagtaagactatataaaattcaagagacctttcagtttattttattaaggtacttaaatccataaagttagagctacagagatctgtacaagtagggcctgttattgcttacttatttgggcaggttctgtctcttctattagttcctgcttagggactgcttattttattctaattctttgttacatattagaagcaaggaaataaatttaaatgaggaaaagaacagaataaaaagaatatagagatcttttagggaccgctgaggctctccagcagtccttgaagattatataaattcccttttgatgaaattctgaaaattttaccactaatagacctgagctgtagtttctctaggactgatacatgaatttttttagtttatttaaatagagttgttgaaatatgtgagagatgactgtattttggtttcagttatgtaaacttcatgaaagaagtgaaatgatcatcagtaacttttaaaaataatgttactaaatattcttattatctaatcatgaatttacgtaatcataaacagattaatctctactttagattttcttttaaattcactgtttaaattttataaatcaatgaagtacaaggcagttttgttacatgcataaattgcgtagtggtgaagtctgagttttttaggatattcatcacccaaataatgtacattgaacccactaagtaatttctcatcatccacctttcccccaccttgtaacccttcagaggctccattgtccgtcattccattttctacttcaatatgtgcacattttttttagcacccacctgtgagtgagaacatggaatatttgtgtttctgcgtctaacttgttttgtttaagatttctagttccatccatgttgctgcaaaagacatttcattctctttatggctgaataatattccattgtgtgtatataccacatttctttatccattcatctgttgatggacatttaggttgattccatatctttgctattgtaaatagtgctgtggtaaacatgcaagtgcagatatctttttgacatatggatttcttttcctttgggtagttacccagtggtggaattgctggattgaatggtagttctatttttagttctttgagaaatctctgtattttccttaatggttgttgtaatttatattcccgttaacggtgtatatgagcattctctgcatcctcaccgtctgttattttttgattttttaatagtagccattctgactggtataagacggtggttttaagttgcatttctctgatgattactaatattgagatttttttcatgtacatggccatttgtatgtctccttttggaaaatttctgtttatgtcctttgcttactttttaatgggattatttgtgaagtttttgttgagttgtttgagttccttgtatattcttaatgttagtcctgtcagatgtatagtttgcatatattttctcccattctgcaggttcttttcactctgctgattatttctttggctgtgcagaagctttttagttttagttgcatttgcctgtttttgtttttgttgcctgtgcttttgaagtcttagtcataatttctttacctaaaccaatgtccagaaaagttttctgtaggttttcttgtagtatttttagtttctagtcttaggattaagtctttagtgtatcttgagttgatttttgcatatggtgagagataggggtccagtttcattcccctgcatatggcaatccagtttttctagcaccattttttgaaaatggtgtcctttccccaatgtgtgtttttatcaactttgtcaaagattaataactgtatgtatgtggctttattaaattcattttactctttttttttcagctacattaacaagctattctgaaaatgtggaacgcacaaaatatgctggggaaagcagtaaagaattaggatctggaggaaacataaaaccttggcagtctcaaaaatccagcatggactcctgtttgtatcgagtagatgaaaacatgactgcttccacctatagtctgaataagatcccagagagaaatttggaaacagtgttatctcaatcagtacagtctattcctttgtatctcatgccacggccaaattcagtagcaggtaagtttttgttgttgttgttgttgttgctgttgttaaataatcattttactccagtatatattgaaatgaaaataaatcctgctctgacagtatttaaattttccattcatcttttctgactaagctgttcttttgtgtttgggtaatatacatgtatatattatttgaatctgggagaaggttcatcttcctcgagtgattgcttagttctgctcccaaaatgtacaaaaacacatagaaattcagaaacagcctataaaatatatcatcaaacaactaaaagtcttttctctcaatgagaagtctttgaaagaattttagtttgaggttttagttcttttcttaaaatcttagttttaaaaaacattactaaaattggcatatctcagtgtaatttgtattatcagaaatcatcatccatagtttgtaaaagtggaaggcagacaagaattcagcttttcctcatcccgtgagtttcagtattttcacaatatcctggctatcatttcatggaagaatcaccaggtggctacatttctaaagaataattctgcaacaccactagcaaactcggttaaaaaaaattgtattagtccgttttcacactgctataaagatactacctgagactggataatttataaacaaaagaggtttaattggctcacagttccacacagctggggaagccttgggaaacttataatcatggcagaaggcaaaggaggaacaagtacctgcttcacaaggcagcaggagagagagcaagcacacaggggaactaccagttttaaaccatcggatctaatgagaactacctcactatcacgagaatagcatgagagaaccacccccatgatccaatcacctcccaccaggtccctgacacttggggattacaattcgagataagatttgggtggggacacagagccaaaccatatcagaaatgatatagcatggtggctcatgcctgtagttgcagcaatttgggatgctgaggcaggaggattccttgaggccaagagtttaagaccagcctgcgcaacatagtgagaccttgtctctaaaaaaaaaaaaaaaagaaagaaatgatactgagggttaagtggttgaaatacggagtcatcattccttagcacctactctcctcaaaattgatgtcaaggggtatttttactacagctaaattgctgtttaataattcaaacctgggacttttgaagaatagttgaatgttctgacttttcaaaatatgtcatcatctggactttgtccagactataaaatcaaagttatgtttgcttctcttactttcctcatgaagacctggatagattatctcactgataattactccttatgtagctgatagtgtaatgcttcttgccattcccagttccctttcctacgtgttctttgttctctgggagaccatcagcatctgtcatcaggtgtgattataggggaaatggctcatctgaaagataagtaactatggaagattttaatattaattgttaaagattattcacttttatatagtgacaggaaattttttatcctaggaccttctaactatgtcaatccccaactaccatgtcatattagaatcctagaatgctgttgttttagtctattcttatactgctataaagaaatacctgaaactaagtaatttataaagaaaagaggttgaattggctcatggttctgcaggctgtacaggaagcatagcagcttctgcttggcttctgaggaggcctcagagagcattcaatcatggcaaaaggcacagggggaacaagcacctcacatgaccaaagcaggaggaagagcaggaggaggaggaggttgcacacacttttaaatgacccattctctggagaactctcatattacaagaacagcaagggggaagtctgccccatgatccagtcaccttcaacaatggggattacaattcagcatgagatttgggcagggacacagatccaaaccatatcaactgtacattatgaaaagttccaggcaagcctgagtcttttccgaaaagaagcatgtaaatccttgctcgtatataaatagaggaatgtaactaccaaccataatagtatgtcccaacttacttcctaactaagctacaatgatttctaagaaaattctggttctattatttgagaaaggcactgaacacttagtagaagacaaagaagctttgtctcaatgagtggaactatgtagtcagtctgaatgaacaatgttaattcagggctatgagtcttggtcactacttaacatcaacattgtgtattactgtcttcttcctacttactccccattatattttatgtgtatcccttagaaccttttttcactgtgttaatcaaggaccttctcatttgtttaaaagcgactcagctcttcctcaggcttcccttagccccaagtgtatcccagaactgttgtacttccctattagccaagtgctccctctctagttgtatcctgtaccttcagagcagtgccagaactgaacagactatgggaagagagaatggaacaagcaagctggttaatttaatgttttgctgttggtctcagaaagccatcaggaccacatgaaactaaccaccagacagtaataagctttgaggcaactaccaaactatctccatctaattcctagccaccttcccaggctgaactcaaatacttcctccttcatgaaactttctccagtcatctcccagccacaagtaattgcttcttcttctagaaagcattctctttttgtgttggcaacagtctactttgtgttatgtgcagctattgtgtatatgtgttggtctgactgtcacaatctaaactttttgacattagcaactgagaagactccagtagaggttccatagtgagtgaactaatgaatgaatatatgcatgaaccaaccaatctgtgatatcagctttaaacaaaaataacaatgtagttagtaaatctaatgataattttcttcatcttactatagaatatagtcttctcataggagagattacccagaaaaaggtggggtgggggcttatttacagaaagtaagctctatatgagatggtagtatgagccagttacaaaacagttttggacttactagtatctcacaatttcttttcttccaaaattataaactgtagttctctttaataatggaatgtataaacagcatttatcactatttgctaacaactggcaatatatatttttcagtggttaatcagaagcccttattcaattagcagtgtaatggtattggggaaaaaaatggagattttaagagatttctgtttctctaagagagcagtcagcaaaccagggcccatgggccaagtttggcacactctatttttgtaaataaagtttcatagcagcaaaaccacactcatttatttatttatggctactttgctctaccacaacagagttcagttgttggaacagagatcataagctatacagttaacattgtagtggcctacaaagcctgtataaaaagggcaatcccaacgttcattctaaaatcttaccctggcgttggattcaagtcacccctcggcgatgcatctcggctatacaggtcatatacagtgttagctgtgcatagggacagaaactgttttagactttatgaaagtttcatgatgtgtttcacatgacttcatgaattacatagagcatcagaaatgtgtaaaaattccgtgagaggacattgttactcagctatactgatacaagatagcaaagacactaaacggatttgaaagagacaaaaaagctgaaattgacccttaagttttaagtttttgtaatatgcatttagctagactcatcatcagtgtggtgcatagacagtgcctaatagtaaattggtcacctgcttgagtctagagccctcatttccaaacttaggaattttcattttggtggtggagaagtctcttaatatattcgttctcattttctcttgacttctttttagtttattgaaaagaatgtagaattactttgctcttcttaaacagacatatctcttgagattcattattttacccaaaaaaatgctaactgtgagcttatgagatgtctaagactcctgtactcctataaaagcccgataagcttttcctctcagtgtctgtgaggctaatactattgtaaacaaaaaatacagaaggaaaagtaaaagccactctcctctctacacctaatatctctctccaaaggttaatatttctgattctttaaaatatatctatatatataaaacattataatatctgtatgtgatatataatcatatatacctatacatgatcctctgtatctgtggttccatatccatggatatggatggccaactaaaagggacttgagcatttgcagattgcggtatcctattgcagatagctccaggggttctggagctaattccctgcagataccaagggatgattgcatttaattataatatatgtaagagagatatgaggtcaaaaatgagtgggattcattcaaaagaaatgaaagcatatgttcttaaaaatatatacataatcatcacagttttatttgtagtagccagtaactgagcatcccagatgcccatcaacaggtgaatggataaacaattgtgtatccatacagtgaaattctactcagctacagagggaaatgaattatggataccacagcaacatacatgaatctcaaaataattattctatttgaaagaagccagattaaaaaaatatatgctatatgattccatttgtataaaatcctagaaaatgcaaactaatctgtaggcatagattgcctctgttatactgcgaccatctacaagtacaggtgccctgtgggaattagggctcaggaaagtggcacaatgttgatcctctggctactgctattgctctgagtaaaaaactgtctttgatctccgacccaaagtttcatatctttttccagcatccaagcttgttagtttacagattcttcacaattcttgacagtgagatatcgctatacccaaacccacaaaattaaaagaaatggcaatggcaagcaacacaaggaaatgctgcaattgaaattatacattgatggtgggagtatgttaataagttggtactccattttgtaaagttgtttgacaagatgtattaaaggtatataaagctatatatgcatgttatctaaaacctcacaattccatttctgaatagaatgtccatgagaaatgagtgcttttgtttatgagaagacagataaaataaagttttatcagttttattcataatatctaaaaactgaaaaccattcacatgtccatcaacagtggaactgataaattgtatgcagcaatgaaaaagaacacactactgttacaacatcgtgaatatatttcacagatgtgatattgaacaaaagaagactcaaaagagtgccttctgtataaagtatgtacattgatataaagttcatagaaacaaaatgatcacacttctataattatagaactaaagtaatggttacctttggtaggattattgactaagggagctttctgtatcttggtctggatggtagttacatggatttatactcatgagaagacttcaaaaagtccatggaaaacatacttaaaagatacaaataaaaaatataaactttatttctcaacataagttccatcaagttcaagacacctttgtaagtgatgataccagccatttagttcatccctaaagaactgagtgtcctgggaatttaaccatgtcaattaagtcttttttacattataaactgaagaaaaatgcatgccttttacagattttaatattaagaaacaaaaaagtcagagccaaatcaagactgtaagatggatttcccatctaaacttgcaaaattgcctttgtttgatgagaggaatgagcaggagtatcattgtggtggaaaaggattctctggtggagctttcctaggtgtttttctgctcaagctttggcttgctcaaaacactttcatagtaagcaggcgggtcatttttggtcctccagaaagtcaacaagcaaaatgtcttgatcaccccagaaaactgttgccatgatgcttgctcttgactagtccacttttgctgtgactggactatttccacctcttggtagcccttgctttggttgtgctttgtcttcaggattgtactggtaaagccatgtttcatcccattaccattcttcaaagaaatgctccaggatccgaatcctactcattttgttttaaattttcattgaaagcatttctcttttctgcagctgatctggggacaatggttttggcacccatttagtggaaagtttgcccccattttaatttttcagtcataattgtgaaagcagaacccattgagacatctgtcatgttggctcttgtttgtgctgttatcatttgtccttttcaattgggatacaaacaagatgaatttttgtggatggtctgccactgcaggcttcaacactgtctcatcccttcttaaaacaagttatccatttgtaaaccgccgatttctttagcgtattgtctctgatatgatttggctgtgtccccacccaaaactcattttgaatcatagctcccacaattcccaagtgttgtgggagggacccagtgggaggtaattgaatcatggaggcaggtctttcctgtgctgttctcatgatagcgaataaatctcttgatttctcatggttttataaaggggagtatgtcatgtaagaggtgacttgctcctccttgccttctgccatgattgtgaggcccccagccatgtggaactgtgagtacattaaacctcttctcctgtgtaaattacccagtctagggtacgtctttattagcagtgtgaaaatggactaataacagtctccataaatgttttgtaaaaatcagtgattttactattcttccacccaggcttcaccataactttgctgtttatccttgcttcaattttagcagaattcatgttgctctgatgagggcttttttcacactaatgtcttgttcttaatgcctcaaactatatcctgttcagacatcttataataagttagtatgaatttattttgatgcaaaaaatttttgaaattcatccatagttttttcataagatgcatttcaatgaactttttgaagactctcacatgtataaaaataattaagctatacaccaaagatttatatactctatatatgtaaatcataccagtttttaaaatatataaaatgtggcagggcacagtggcttacacctgtaatctcagcactttgggaggacaaggtgggtggatcacttgaggtcaggagttcgagaccagcctgaacaacatggtgaaaccccgtctctactaaaaatacaaaaattggccaggtgcagtggctgacacctgtaatcccagcacgttgagaggctgaggcagacgaatcacgaggtcaggagttcaagaccagcctggccaacatggtgaaactccgtctctactaaaaatacaaaaacttagctgggcgtggtggcaggggcctgtaatcccagctactcgggaggctgaggcacagagaatcccttgaacccgggaggtggaggttgcagtgagctgagatcgtgccactgcactccagcctgggcaacaaggcgggactccttatcaaaaaaaaaaaaaaaaaattacctgtgcatggtagcgtgcacctgtaatcccagctgctcaggagactgaggcacatgaattgcttgaacctgggaggcggaggttgcagtgagccaagattgcaccagtgcactccagcctgggatacagagtgagacgctgtctcaaaaaaaaaaaaaaaattatatgtatgtaggcctgttgtctctgcagaaggattttctcttttctttggtatagaaatagcagtcctaggaaacataacaagatctttgtctgaattatctattttagtgttgcttaataaaacctaataactacaacaaatagataatttatttaaaatgtttcattttattgagtatataaacctaagatgagtacccaaactggccagaacttttttttttgtttttttttctaaagcagcagtctgtgtgtggatttttaaaaaaatttttttaaaaacaagtatattgagtcttattttatatattataaaattcacccatttcaagtgtacaattcagtaatgtttagtaaatgtagcaagttgtgtaaccctcaccatgaatcagctttaggacattttcattacctcagaaagatttctgcatctatttaacattaatcccattccctctcccagttcccaggcaaccactaattgacagagtctatatatttgtattttctggaaatgtcacataaatggagtcatatggtatgtcgtctcttgtatctggcttctttcactcagcataatgtttttgaggtttatgacgtatatatatcagtagtttcttcctttttatttcaagtaggattccactgtatgactgtaccatattatgtctattcatttaccatttgatagacattgtttccaattttggtctattgtgaatagtgctgctgtgaacatttgtttgcaagtgtttgggtagacatatgttttcatttctcttggatagatagatacctaggagtagaattgctgaatcttatggtaagcttatatttaactttttaagaaatgcaaaaatgtttttctaaaagtagctgtactgttttgcattcccaccggcagtgtacaaggattcctgtttctctacatctcctttgttactgtcttacctttagctggtgtgaaatgatatctcatgaggttttaatttgcattttcctaatgactgctaatgttgagcttattttgtgtattgttatctattcatttattctttagtgaaatatctattcaaactttagcacattttcatattgggttattttctttggatttgtacgaacttgttgtatattctggatacaagtcacatcagacatgtatttgcaaatacttcagtctgttgcttgtctttttgttttcttactggtatattaggaaatataaaaatgtcaaattttggtgaggtcaatttgtcaattttttttctgatagaccatgtttttcatgtcactttcctctttatctttttaatagaaaacatactgtttatatcatgtattataaaactgatttctttacgacattggggtttgttttaactcaagtattggaaaatacttcctgaaatacttaatattttttccctcttgtccctcctcttcccctactcatgttaaaaaaaaaatagaaacaattacatcatcctaaattgttacatctgtagactagaccttaattgttacatctgtagactagaccttaattgtgaatgatttttttatttaccacaattgtcttcccataatgttagtctttctggctagcagagtgctttagattcttaagcagtacttatcactcatccttaaaggaagggtaaaaggtaaatataccatcagagatcagatagctctgtcctggagaacaagattatatgctactggagtagtacatattgactgtgttgaacaaaatacttcatcagaaaattatttcttgtcagtgttgaacataatacaaacagacctactttggcctacagggcaagtcatatgtcagggaatagtttgtattaggttgttttttgtatctggaaaccatggtttcaggatgctcagaaagaggcagaaaaggaagctataaaccaaatgactcagttattttcaacacttagtagattgtagattgaaaatttttccagaacgtagagaaataaaattactttcacagggaattgccctgctaaatgtataatgtatgtaaatatttgataaaaccacaacctctggtagcttaaatgattacgtatctaaaccatttttaaattaaattttctcgtctcaggagggtctgctcttttcatttagctctagatacacatactttcctttcctttctaatgggtacatagaagtggttccctaaactggggagactccgatgctaaatctctggtgaacaggaataattgaggatttcaaatatgaagtgagcttgaaataggaaaaaaaagtatattcacacttattaaattgttctaagcatctgaacgtcaagggcaggatggggatgggaatgatgaatgccagtaataaaaagccttattcagatccaacttttaaacttctcatcttttttaaacttaatttctgtgtgactaatataattatttattttagagaccaaatgatgttgaataataatgtgaaaaatatcatttgagtaacttttaaaaacctgggttaataattgtttaaatggtccttgccatgatacagatttctccccaatttgggaagaggatcaccttctattgcctaagctccttagcatctttttaggaccacatcttctggcatgaccaggaaatttttaggggattatttaaaatccttgaggctgctactggattgaactgtaatgaataaaactatatatattgttccataatgccaagattcttgattttaaaaagaacagaaatgacttgtggcttttgtgacacttttgtggggagaatggagtcagcatgtatgcaaatatttatggtgaattatttttaaaaatatttttctaagcttttaacttacatatgacataaatggaagaaatatatatagtgaaaatttttaaaatcgtgtattttatttacagtattaaaatagaagtttgactaatacgttggtcaaatagattcagctgcatacttttaaaaacataaagactccaactagtgaagttcatagttaaaatagataaaacaattaacactccatgttccacatatgaggatagtactgtttgctgaaaacatgaaaacttttaactcaaatgataaagtgattaaagttgagttttggcagtctgcaatattaaggctcggaattttctggagtagctcagttttctgaatataaacttagctgttcatacacctttaaattaaaattctaaaatattaaaaagatttaacaatgtgttttgttttcaaaatgtaaattgctattgcatatttgtttttaagcctgtgtgttggaaggaagtagaagactcttgtggacttgtggttgcatggcagaaattatcagagtaggcagtctacggtcatccttgatgtccaaaaatgagattggcagtgaattagagggatgtgggaagcaggaaatgtttgcttgcaacagctgtcgtcagtgctttgtgtgagaatgagaggtctatcaaggaaacatacaaacaacagaagtcagctaaaatataaactctggccatctacatgttaatgcttggagcttcatgttttcctaagaaaaggatcttaagaatcaggtaaatacagaacgggaatctagggggatttaagcaaacccaatcagaaacttttaatagagattttgcaaaaatcaaaaatgggcttttcagcagtcagaacgttggctttatgtatcaagggtataaggacagcagaatggcttcttgcccaggcaggagcaaacatacagtgtcattccaggttccttgctcaagtcagctagagtgacaattttactactataatctgtttgcattagtggcaactgatataagaagaaacaattcaaactgtcttccaaactcagtatagagttatctctaaaatgttgtataccaaatgtctgttagatttcttctgcccacttgtagtgtatttaaattattttaacttcaaaaatgcatgtcagttaaatgctgagttgtcctcagctgttacaacctgatgaaatctaaaaaaaagctgttctttttttcttttccctgttccttctcaaaacaagtcttttaaatgacaaactttgtggatttactttttaaagctttttctctttacataaaaattttgttatagatttgtttttctgctttctccattcatctgaactcacctgattatgtcttatacttgtatctggaaagtgttagttaaatattatagtatttatttatttatttatttatttatgaatgaatgaatgaggcagggtctcacagtgttgcccagattggtctcgatccctgggctcaagcaatcctccaacctaatatcttcccaatataatgttaatttaatctgacagaactatctcaaaaatttttgcagtacaattgcgtagtaagactagcgctataaggtaggaacgtatgtgtccctatagagccgtcattggtgtttgtatgagatgatgatgtacaaggcattgttgctatagccaactccttcaaaataacccagtaagacaaaagttaagttgttgtttgctcattgttaaatgtagctgaaacatgaaatgtgcatataataatggttattcgttcattagacaagtatttattgagcaggtactatatgccaggcactgttcaaagcacttaagtatcatcattaataaacaaaacaaagattcccattctcatgtagtttacattattgctgggaaaagtaatgttagtaagtaatgttacccaggctggtaatttataagtaatttatatactatgctagaaggtggtgtatgctatggaaaaaaggaaaagggggatcatgaatatctgaaggaagataatagaaacgttgttgaagctaagcatattattttagtgatatctgttaagcattaagaaagcaaaacagtgaggaggaggaggatcgtgccaaacggattatgaaatctaagtaggaccagtctggaatttagttctacattgagtatcatgtgcagggcactctgatttactctgaagtggtagagtaatgaaagatgaattgggcatttctttcttgttctcaagaacctactacaatcagtgaaggaaggcagacatgtaaacacctacctgaataacacaaattctaaacagcagtatatatttatgtggttgctgagaaggagaaccaattaattctgactgggagattgattaggaaagcaaggaaagtgcagcctaagcaaagttttggcaaagggaaagataagtttgacgcagtttgaccaagcctttttatcagaaaatgatatacaaatggaaaagatccaaatgactgtgaggaagagtacaactaggtacaactagaagaacaaagggaaacacctaacagaagtttgtgtctcctggctgatctttccaatatttgtctcatatgcctttaaataatctatttgaaaggagaagaattttgaaaatgatgaagcaaagagaaactaaaagaggactagggacaatgattaataagaaaaaaaggcagtggaaaatgatagattcagataacaccaaccataattttattgtagtcccagattaaagccatagttccccatttactgattggaaagctgtctaagcccaacatcaggaccccagagctattgcatttgatattgaatatcgctgcttttttttaaggtcattgtacttctatttggatttttgaaggaatgaactattcactcagttcagtgatggcaatatttgtctttttcttctagtgtcatttgtctgaaattgagaaatgtgctcatgccaaagcatatttactatatttcttggttttgtgaaataaatcaaggcgatagaatagtgatgttcatcttcctaggtatttcaatagtaaagattagcttaacttgttaaaaccacactaaacattgatattttacaaaccaccagcttttatttaaatataagaagttaaacgtgagaaactaaacctgtggctaaaagtacttgccagaagattttttgatacaaaaattaaaatgaattacatgactattatttaattggaatatgtactccacagtataagatctctcatagtttaatctttaaaatattagatgagtataattttttaaaaatatatctgtattaggcttctttctttttaatttttatgggtcatagtatatgtatatatttatagggtgggtgagatattttgatacaggcatacaatatgtaataatcacatcagagtaaatggcataaccatcacctcaagcattgattatttttgttgcaaacgttccaactattctcttttagttatttttaaatgtacaatattgtacattttgttgtacaaaattattgttgactatagcccaccctgttttgctgtcaaatactagatcttattcattctgtcaaactatatttttgtaccttttgaccatccccactacccccaccccagcgacccttcccagcctctggtaaccatcattctactctctgtctccatgagttcagttattttaatttttagctctcacatatgactgagaacatacaaagtttgtctttctgtgcctggcttatttcacttaacataatgacctctggttctatccatgttgctggcaatgacaggatcttactcttttttatgtctgaatagtacttcattgtgtgtatgtaccacatttttttttacctagtcgtctgttttttgttttgttgtgttttggtttttttggaaggagtctcgctctgttgcccaggctggagtgcagtggtgcaattacccagtcttctgttgatggacacttaggtttcttccaaatcttggctatcctgaatagtgctgcaacaaacatggaactgcagatactaattttccttctttggggtatatacctagcagtggatcatatagtagtactattttcaattttttgagtaacctctgtaccattttccatagtggctgacctaatttacattcctactgacagtgaacaagggttcccttttctccacatctttgccagcattcattattgcttgtctcttggataaaagccatttgataatatctcgctgaagttttgatttgcatttctctgatgtcagtgatgtttagcaccttttcatatgcctgtttgccatttgtatgtcttgtgagaaatgtctatttttgcccattttaaaattgtgttactagatttttttcctatagagttatttgagctccttatacattctgcttattaatcccttgacagatggatagtttgcacatattttctcccattctgtgggttgtctcttcactttgttgattgtttcctcccttgtacaaagctttttaacttgatatgatcctatttgttcatttttgtttgggctgcctgcccttttagggtattaccgaagaaacctttgcccagaccagggttctgaaaaatttcttcagtgttttactttaacagtttcatagtttggggtcttaaacttaagtttttaatccatttttatttgatttttggttttgggtttttttgacataggatctcgctctgtcacccaggctggaatgcagtggcacaattatggctcactgcagctttgacctccctggacctcaacttcaagtgattctcccacctcagacctcgagtagctggaactataggtgtgtgccacccacacccaactaatttttggtttgagggtttttgttgttgttgttgttgtttttggtagagacaggttttcaccatgttatgcaggctggtctcaaactcctgggctcaagcagtcagcctgcctcggtctcccaaagtgctgggattacaagcatgagcactgtgcctgctgcttgggatggctttggctatttggggtcttttgtggtttcatataaattttaggattagtttttctatttctataaagaatgtgattattattttgataggattgctttgaatctgtagattgcttttggtagtatggacattttaataatattgattgattccagtcaatgaacatgaaatgtctttcccttcctttgtgtcctctttaatttcttacattattgttttttagttgtagagatctttcactattctacttaaatgtattcctagttattttatttgtggctatcataaatgagattactttcttgatttctttttcatcttggtggctgttggcacatagaaatgctactgtgttttgaatgttgattttgtatcctgctactttactgaatttgtttattagttctgtttttttgtaaaatctttgggttttttaaaatataagatcatatcatctgcaaacaaaaataatttgacttcttcctttccagtttggatgccctatatttctttctcttgtctgattgctctagctgggacttccagaactatgttgaataacagttgtgaaagtgggcatccttgtcttgttctagttcttggaggaaaggcttttagtttttccccattcagtatgatactagctatgagtctgtcgtatatgtcttttattgtgtttaggtatgttccttctgtacccagtttttttaggatttttatcatgaagggatgttgaactttagcaaatgctttttcagcatgaattgaaatgattgtattatttttgtccttcattctattgatatggtgtagcacattgattgatttgtgtgtgttgaaccatccttgcatccctgggttaaatcccacttggtcatggtgaatgatctttttaatgtgttgttgaatttgttttgctagtattttgttgaggatttttgcatcagtgttcatcaggaatattggcctgtggttttcttgttttcatgggtcttcatttggttttagaatcagtgtaatctagaatcatagaatgagtttggaaatactctcctcctctacttttttgaatagtttgagtaggattgggaatagttattttttatttatttatttatttatttatttatttatttatttatttatttttatttatttatttttgagacgaagtctcactctgtcccccaggctggagtgcagtggcactatctcggctcactgcaagctccacctcccgggttcacaccattctcctgcctcagcctcccgagcagctaggactacaggcgcccggctaattttttgtatttttagtagagacgaggtttcaccatgttaggatggtcttgatctcctgaccttgtttgtgatccgcctgcctcggcctcccaaagtgctgggattacaggcgtgagccaccgcgcccggccggcagtagttcttttttaaatgtttggtagaatccagcggtgatgccattggatcctgggcttttctttgctgggagactttttattatggttttgatctcattactttgtctattcaagttttgcatttcttcatagttcagtcttggtaagttgtgtatgttgaggaatttatccatttcttcaaggttttccaattgattggtatatagttgctcatagtagtctctaatgatcctttgaatttctgtggtatcagttgtaatgtcgttttcatctctgatttcaatttatttgggtcttctctctttttttcttagtctggctaaaagtttgtcaattttatcttctccaaaaaaaacttttcatttcattgatcttttgtattttttgtttcaatttcatttatttctgctctaatctttatttctttccttctactaagtttgggtttagtttactgtttactttgttctttaagaagcatcattaagttgtttatttgacttttcttttttttttttttttttttttgagacagtctcactctgttgccctggctggagtgcagtggtgtgatcccagctcattgcaacctctttcccccaggttcaagcgattctcctgccttagcctccggagtagctgggattacaaatgcccaccaccacgcctggctaatttttgtatttttagtagaggcagggtttcaccatgttggccaggctggtctcataaactcctgacctcaagtgatccacctgcctcggcctcccaaagtgctaggattacaggcatgagccactgctcctggcctctaccttttttatgtaggcacttattgctgtaaattttcctcttaatactgctttcactgtatcctataggtgttccatactagttctgtttccattttaatttgtttcaagaaatctgttaatttccttcttaacttcttcattgacccactgatcatgaggagcatattgtttaatttccatgtgtttgtatagtatccagagttcctcttgttactcatgtctagttttattccattgtggtcatagaagttaattcatatgattttttttaattctttagtacttggtctgtgacctaacatatggtctgcccttgagaatgatccatgtgctgaaaagaagaatgtctattctgcagccattggatgaaatgttctgtaaatatctattagatccatttggtctataatgcagattaagtcgaatgtttcttttgattttctgtctggatgatctgtccaatgctgacagtggggtgttgaggtctccagctattattgtattcaaatctgtctatctctttagctctaataataattgggtgctccagtgttaggtgcatatgtatttgggtgctccagtgttgggtgcatatatatttacagttgttatatcctcttgctgaattgagccctttatcattatgtagtgactttctttgtctctttttataatttttgtcttgaaatctattttgtctgatataactatagctactcctattctttttttatttccatttacatggaatatcttttttatcccattattttcagtctgtatatgtctttgtaggttaagtgtgtttcttgtaggccacagataattgggtcttgttttttgtttggttggttggttggtattttttttttttttttggtccattcagccacgctgtgtcttttgattgcagagtttattccatttacgttcaaggttgttattgatgaggaaagacttactcctgccattttgttattttttttctcattgttttgtgttcttctttatttccttcctgccctccttgttgtgaacgtgatttttttctggcagtatgttttaatttcttgctttttattttttgtgtatctgttgttggctttttggtttgagattaccgtgaagcttgcatataacatctggtttcggtttttgtttttgagatagggtctcactttgttacccagggtggagtgcagtggcgtgttcttagctcactgcaacccccacctcctgggctcaagtgatcctcccacctcagcctctctagtaactgagataacaggtgcacaccaccatgctcagctaattttttgtagtgttttgtagagatggggttttgccatgttgcccaggctggtcttgagctcctaagctcaagcagtccacctgccctggcctcccaaagtgctgggattacaggtgtgagccaccgcacccagccacaggtaacatcttataacccatttatttcaaactgataacaacttaacactgatggcaaaaacaaaccaactaataagcaaagagaaaactaataaaaactctctacactttaacttcatctcccctgctttttaactttgtattgtttctatttatatcttatactatctatgtcttgaaaagtagttattatatttgataggttcaacttttaggctttctactcaagatatgagtagtttataaatcacaattacagtggtctgtgaactatactgttacagtgagttttgtacctaagataatttcttattgctcattaatgtccgtttctttcagattgaagaactctggttagcatttcttgtagcacaggtctgatgttaattaaatctcttagcttttgtttgtctgggagagcctttgtttctccttcatgtttgaaggatgttttccctggatacgctattctaccatagaattttttttctcatcagcactttaaatatgtcatgccattctttactggcctgtaaggtttccactgagaagtctgttgccagatgtagtggagctcctttgtatgttgtttcttttcttttgttccttttaggatcctttctttatccttcacctttgggaaaaagtaccttgagatagtcttatttgggttaaatctgcttggtgttctattagcttcttttacttgaatgttaatatatttctcttagttctctgttattctccctttgaataaacattctaccccagtctctgtctcctctttaatgcccaaggcagatccagaaatgctgtccaggagccagggcctggagtcaggaaccttgaaatctacttggtgttccatactagtgcagtggagcgggcaccaaagccacaagataaagtccttcccactcttcctcaccttccatcgtgtagaaggagtctcaacaccccaggcccatggcaagtactgcctggctactgctaatgttcactcaaggcccaagagctcttcattcagcttgtggtgaatgctgctaggcctgggtctctcctttcagggtaggtggctcccctatggtccaaggcaggtccagaaatgccatccaggagccaaggcctggaattggggaacccagaagccctcttggtgctttacccccatggccaagctggtaccctatctataatacaaagcccccttcactcctgcctctcttttcctcaagcaggagtcctccctcaaaaagggaatacacagagtcacacctaaggtcagcatggccctgggtctcatccaaggcctgtggcaagtgctgtgtgagtactgctgatgttgattcaaggctcaagggctctataatcaacaaataatgaatcctgccagtactgggtccttcctttcaaggtagcaggttcccttctggcacggggtatgtctagaaaagtcttctgggagctagggcccgaaataggggccccagaactcttcctgcggccctattctactgtggctaagctggtatccaagttccaagacaaagtcctctttactgtctcctctcttctcctcaggtggaaggaaggcatctcccagagctgtgagctgcactgcttggggttagtggaggggtgacgttagcactcccttggccaccccagctggtgtctcactaggtcaccagcacccaaagttttaatatgatgttaaaaccaggtactaggattgctcacctgatttttgggtcttatgaaggtgctttcttatgtgaatagttgttcagtttggtgttcctgcagggggacagggaaacaatcgttggagggtattatttgactatcttgttccaccttccctcgtaggcttttttcccttaatacagcattttgctgcactccattttatacatttctattatcatttttactcactattaatgaaaaatacattctcttttaattaaaacatgtcaaaccattttaatgtgagccattttaataaacgaactctcctagaaccttgctttgaaattatatactgtgccattaatattgccataatggtaaccagaaatttctgtcgctcacccagctgttaagattttatttgaattttgctttaatgtaaatagaagatacttatttccattaatcttcttttcaaattactcttcagtttatcagcttaaaaagtaccctataattatttttattttcttatgaaaaatagtgttttgggggcttttgtttgttttttcattttgtttcttactgcagaaaatatttcaagcgcagagagctgtgatttattagtatatgatatacagggtacattactttgcattagcaaggtcactattactactctttgaagccataaaacagaattaaaagaaagtggcgaagatgaataaggaataaaaaataagcttttaaaaagagatttaaatctgtttagctttaaagtgggaaggaaggaggcactcattgtactgagagtcaggatacctggcttcatgggctgctgtactgccagtgactgaatcactttagacaagtcactccactgtttcctaatcataaaatgagaggatctgaatagatcaggattcagcaacttttttattaaaaggcagctagtaagtattttaggctttgcaggccacatggcctatatcactacttagctctgatataaatgatactgtatttacatgaataagcagggttctgttcaagtaaaactttattaacaaaaacaggtagcaggccatatttggtccacagattatcatttgctggtgtttatactaggtgatcttttaagatttctcatctgggtgcgatggcccacgcctgtagtcccagcactttgggagaccaaggtgggctgattgctttgagctcaagagttcaagaccagcctgggcaacacagcgaaaccctgtctctacaaaaaattagccaggagtggtggtgcacgcctactcggaaggctaaggtagaatcgcttgaacctgggaagcagaggttgcagtgagccaaaatcacaccactgcactctagcctgggtgacaaaatgagaccctgtctcaaaaaaaaaaaaaaatttcttttgcatctacattctgtgatattgctttattatcaacatcatgtatatgaaagggactggtgttcaattcttttctatcctgtatcatttaggggccagtcaggagacataaaagcatacttattttaacagaataagggttgaatttgataatataaataattgttggctggtcacggtggcttatgcctgtaatcccagcactttgggaggccaagttacaaggatcatttgaggccaggggttcaagactagcctgggcaatgtggcaaggccctatctctacaaaagaaattgtttttaaatattagccaggtacagtggtgtgcgcctgccttagcctcccagctacttcggaggctgaggcaggagtatggcttgagcccaggagattgagactgcagtgggctgtgattgtgccactgtactccagcctgggtggcagagtgactagtttatctcaaaaaagaaaaaaaaaatcattaactaggtttaaagaactgaaaaggtagtaagaaaaccttgaggtatcatggatttaacaactgcaggaagtagttaccacctgtggacctgaggaaacaaaaagaggcaagaattattaaactatacaagattggaagaaaggcctcacaaagctgacacttacatctccatgaaggggatcctgctcagctgaggctaatacaagggctccaagaagggttctgtggagattagacccagaccactaagaacaaggcactggtcacccagtgccagtatctgaagacgtgagatgaggttagtcccgcctcccttggaaaaactgcaaactagattcaactgctgctcctggaatgaactgccaatgcttggctgaacaagtaagactagggtaatgctgataggaacaggaaggggcaaattatttctccagtaaccttaacaattaacaaagtccacctttttggctaaccagcatccatactcacccttctatatttatttgagcttccaaactatacatgtttgaaactccaaacattttcagcacaacaaactctgtattttaacctaacaagatggaagtatctttcatgtaattgaagacatatttacctctccaaaatgaggctagttccaacagtcactttaactatgtttagatgatataacactatccatctctggctatgttaattattcctcaaactctgacacagtcctatctgaatggtttgttatctaaaaactaaattggaaacttaatttacatcaaaacttgtatttataaaataagggaaaggaggcgagaaaaagaataaattagtataacacacacacacatatataacaaaagcaaggaacaaaatatgcatagctgctatagtcgtcatttctgtagctagttatgaaactgagattgattttttttctttaagagacaagagtctcactctgtcgcccaggctggagttcagtggtgctcactgcagcctcaaactcctgggctcaagcaattctctcacctcagcctcccaagtagctagcactacggacatgcgcactatacccaatcagtttttttgtttgtttgtttaattttcagagatgaggtcttgctttgatgccccggctggtcttaaaagtcctgacctcaagagatcctcccacctcagccttcttagtagctgggattacaggcgcaagccaccgcacccagctgatatttgtaacttttttcatctactgcctatcccatgtgtcctttgccctaagccaggaccacatctagtcagggttctttccctggtaggatgtcctaagtcttcattcttgatgggtctgaatccctagtagtcctctttttttttttttggtagctacatagatatcgataaagaatcaaacaaaagaaaatagacttcagttaaagcaggaggcattggattaaacataagaaacaactatgggccagggccaccccctgcatcttggcctaaactcctctcaacccccaaaaaagaaagaaagaattcatggaaacattagaacagcaatagggatggttttgtcgttgtccctaatgttttaaaataagacattagatacctcttctgggtagttttaacttcagaatgctgagataaagattttttttaatacttttgctactcttttactctctctgatgtaaaatgtggcatctaacttccctttcttagtttaagttccctaaactagctttcaaatacttatttctttatagaaattatatctacaatttggataaattcctttagctgggtttccagtagacctagataactaagacgggaaacataaagcgtgtgtattgttaagcacattttaatcggctcttatcatagttgagcacagagaagaacattaacgttattaaatgtaaaactctatatattaatagtgatgagctgactctgaattttcagcctgccaagaaatcttttaaaaagagcttttactgcaaatcttgcttatttaagatagaaaagtaggataattatatattataactaaatgaagatcaaataaaagcagagatctagagcagacaggacacatcctggcaatctttatgataactggtccaaagtgtcagtaaaataattgggcatttcagagttatattataaaagttggttcaaacacttaattataaaaatgtcttttgaagcttaaagtaccataaaatgtgccaattatatttcacagaatatcactttgatttctctgtaaatcaaatctgagttgtttattttttgttgtatttattcttgaaattagctgattctaccttttaaaccaaagaaagctagtgtaatctaccatgttatagaacaggaaagaattttcctctgcctttgtagatgcagtacaaaagaaagtcagcaagcctgttcttgaaaccatactttacccaaacagcccttggtcccctttcaacaaattaatttaataagcatttttgagcacctattttatgccaggcataatgcatttattgagaatagaatgtaaataagacatagtccctgctcgtgtagagctattagaattctacagcctaagccatactcagatgttgaaagatcgacaggtatatcactctgctattggtacaataatgctgtgtaacaaactatacggaaatataacagctcaacataatcatttatttgtacccactcatctcaggttaactatggattgattggtctaggcagtttggttaggtttggctccaagctggagactggctccagatctaccttattctatcctccttggaccagtgggctaactggacatattctttcataatgttggcagaaccaaaaaagacaagcccagttctacaaacacattttaaatccttccttgtatcacatctactaatataccattagttaaagcaagtcaaatgatcaaacccaaagtcaagggcagggaagtgtactcaacctctgatgggaattactgcaaaatgggattcagggtctggtggtgagaactgcaaagacagatgagaaagagcatgtatataggaaaggctgaagaactgggggcagtatttcagtttgctccaggcatgttttggggagcagcaaatgcagagataaccagtagctcccttccactgccttttttggactattatgaccaagcaaaatgccagtatcaccagagtgtttcacctcgcctttgcaaggagaaactgggttatcattgtgtcttgaatgttgagaacttggattgaaagcttcattgtaatattaaacttatttaattgagtaatttggggagatggtataaagttaaaagatttctcaactttttgtgttgagaaactacctatttttatagtagtgtatatggaaagtaaactgctaatagtgtgtgtggcttgctggcattggagaggcacaggaaaagagcaaagaagtcattaccagcctgggcaacaaagagagaccctgtctctacaaatagtaattttaaaaaattagctgagcgtggtgatgcatgcctgtagttccagctacttgggagtctgaagtgggaggagaccctgagcctgggaggtcaaggctgcagtgagccatgactgcaccactgcactctaatctgggcgacagagtgagacttcgtctcaaaaaaaaggaactcattaccttctcctgttgccaacatcactcccaaatatatttaccatactctaaatgtcatgatatcaagagtttactctgttagaatagtcgcaacagtttctgagctctgtgtagtccttgggcagaggaagatttttggtgaaagcttctgcttagaatcagttacaggttgagtattcctaatctgaaatgctccagattcataagtttttgagtgctgacctgatgctcaaaggaaatgctcattggagcatttcatatttcagatttttggattatgaatgctgaaccagtaagtataatgtaaacatttcagaatctcccacaaaattcaaaatttaaaacacttctagtcccaggtatttcagggaagggatactcaacctatatcagtcttcttaatcaactgacttgtctccctgggccaatggtatggcctctgtttgggattaatgacccattttcagagctgctgtggaatacatatgaattggaatctatatctgtgaaaagtaggatatcctaatacaaaggactcatataatgactaatgttttgtaactacttagtaagtgttttaggtaatatttatgttcaaaatatccaggaaaggaagggagatgatgcttgtagtagtagttttagtaaaattaggggaatagttgtgctcagactctcctaatattattatcttcatatgggagaggccaaaaattacccatagggattcttagcaaagacatagaaatcttccaagcatctctccaggcaagaagcccatgcatttctcttaagagactagacagaatgtcttcattgttacactttctgttttttttttgtttccctttaaaataaaagccataattcaagaaaagcatgttgcacactacccagcacattacaggtgtttaataaatacatgttcattccttttagttcttttcaccttagtaataaacttttaaaaagattattccttcttctttttgatataagcagaagaatcatctgtaccatcaagagaaagagagggtaagaggtagagaaatagaaccatattgctaataacaagagttatgcaaagttgaaatatggtgtatcaagagatagtgacatgttcaggcataagctatacaactacattgaaaaagataacagagttgagcattgcacaggtgttggatgggatagcccttaaggtccattccattcctgtaattgtaataaaatattaataaaattttaataaatttttaataaaatattcttttgactgctatctgctacattctttagtaaaatgtttccttgctcatcttttttctttcctatacactgattagaaactatggtaaaagtattgttacggcacagtgctgacatttttttactaacaattttgttatatttgttaaatgaatgaacagattaacaaatgaatatcagtacccaatgtcaatcatcataaacaacttatatatgaggttggagatgtaagtttacttactgtcataattcttgtttccttatgctgagggaattctgagctgtctccccttccttttttgcttcttagtttatattgaagagcttatttataatcagctatttggtaaggtagtatatatcattggtggcaaaattggatttcttgattaaaattttggattataaagtttttgaggcaaatgaccatgtaatctcaacacatcatacaatacagaaatatactccccaagtatttggtggcaaaacatttgaggcccagcagccataaaaagataatcttaggggttttttttccctctcaccaactcaaaccagttgttagtaataagttggtagctaatattttcttcctttttttgtggtgttattgttgttgttgtttgaaacagggtctctctgttgccaagtctgtagtgcaatggcatgatcatggctggctgcagccttgacctcccagcctcaatcaatcctcccatctgagcctcctgagtagctgggactacaggcgcacaccaccacgcctggctaatttttttgtgcattttttgtggagacagggttttgccatgttgcccaggctggtcttgaactcctgggctcaagcgatccactctcctcagcctcccaaagtcctgggattactagcatgaaccactggtagctaatattttcaaacaataaaatggatactctagtatttcttataatttgaaacatttttgtaaaatgaattttttctttcactcagtttttagtaaaaacccatttactatttcttttgataacaaagaaacttcctttttgttactgtctctgcagctttcatgatccagacattcagaggcaagatggcattttaagcttttggactagcattttgtttttcattttaaatctcaaatctaccattatctatttcttttatgaagtaagggtttatgtttatttgcttagtttgttttgctttttgaataggaaatatttaatccctctgtttaaggttatagaacctcttagcaagcacaggtttattatgtactgtcttaaagtagcaagtgaaatgaagggttaatattttttacaaaccacttatttggatttttaaaggcataaaatacatgtattttatatatattacatattttgcatatatattttttggctggagtaagccctgattccaaagttccggagatacagactagctgaaagacattttctgaacttaaatattctaactaaacttttctttcttgtcagccaccagctctgcccacttggaagaccttgcttacctggatgagcagagacatacacctttgagaacttctctacgaatgccaagacagagcatgggtggtgctcgcacacagcaggatttaagaggttagaaccacagaagggctttaagggtgcccgggaacagatggaaatgggcaaaagccaaaaagttgctttgtctcctattcccatacttacttaaacctccctaagaagtgaaatgatccattttagcatgtgaccagttcatttctgctgagtctagagaaagataaacacaaatacattgtactcctcatagacaggcattgtgtaattatcaacatttggaagcattagttcctcgaaattctgaaagaaaacagatgtaaaggggctgtggtaatgggggaaataacctttctaagatcttggatttcagaagtgactgcggaccagattcagccctagccatattgcaggtgaactgtgctgatcataatgtacaggttgagcatccctaatctgaaaatccaaaatgcaaaatgcttcgaaatccaaaactttctgagtgccaacatgacaccacaagtggaaaattccacacctagcttcatgtgatgggttgcagtgaaaactttgtttcacaaaatgttgagtaaaattaccttcaagctatgtgtataaggtgtgtatgaaacatatgaatttcttgtttagacccaagtcctatcaccaagatctttcattatatatatgcaaatattccaaagtccaaaaaaatctgaaattcaaaacacttctgatcccaagcattttaaataagggatactcaggctgtattttgctagggaatttttttcatttttgttttagtggccatttctagtaacatgcaatattttattatcttggtcttttagaaagtgcctataatcctggcctagcaagagctacacaacctatccttttctcactcaggtacctgttgccttaccttctttgtggcatgctacatgcttctccaagctggcaccagatctttttaaagactgtcattttgttacagtgatggtctagttgaggagcctcttattggtatttctatgcctctcgtttgctcaaaatgaaccaaactgtctctgatagcttttaacagatagtctcctttctctggtatgttagcaatctctatctctaccacaagtgtgtttttaattttatcttacggatgattttcatctttctttagctctcctcttcaccccttgtcctattccctactctaagcagtatagtgccacgtgcacaattcccatgggaaggaatttatacatgtctgctgtccactctagacatcattatgctaacagtttttcagtgatggctaagcaaacaggattttaaaataattgattgtattgcaacaattaccatacctcccatcaacagcagttagttgatagcctcagtcatacttttagttcccagtccttttgtccatcctgcttgccagttcttcagtttgtcatataccagttgcatggcatatgcaactgtgtgtttacagtccagaaaatggaaatatatcaagcactattttagactaattacatctaaagtctgaataaagttgatcaagagaccaaataattgatttgcgccccgaccagaatgcacagccgtaataaagaagattggacagaactactgatctatatggaccttcagatttgattgaaaatctgccacattggcatcatcttccatcttattactaaaaaacatactgacattgttgactttattttctgctttactaatcattgaataatagatgttatactacatagaaaacaaaattatttgacagatttcagcagtgaaatttttgggaaacctttatattgagttctgttgatatgtggtagtacctatctgcttgtagtatctgaagatttaataaggtctttaacagatacattctggtgagcttgatgtttacaaataccagttttatctggaatgcaacaaagatcttttccattgcattgatcttcagccgaagcattcagtgaaacaacaaaagcacattcaaagattttcccaaagctcacctaaatctttaggaagggctctgactgaatattgaatttctaaaaatactaatttcatattccttgcaaatagtgtcttaacttattgtttacattaatacttaggctggagtttgtccattgatgaagatgctatgatgttagtatttcagttccttgaagtcatctttatttttcaagagctttccttttagcagtctaaacggttagaacatgccatccagctgggtacattgatccataaaaagcaaggtgtttacttagcagtgtaaagtatactaaaactagtaataactttaattcagaattttcagaatttagagtccctgaacaataatcctctctcaaaaagtaacatgttatcttaattattgtttacagatgaattgtatggcttaggatacgacttaaaacacattatcaagaaaggaaagcaaacttgggcagataaactttccttatgtttcttcagacctgcttggcaagcctttataatatgtgattattatatccacaatgttgtactttatttcagaaaaaatcagatttgttttcctggaataatttttaaaaacatgtcacatcatgctttctaattttatttaaaggaatgtacaaattacagtcatatttcagtttgacatatttttcttctgattatgattaaaatgaaactacccccaaaaaagtaatgaaatgattgaaaatcttttttagtctgcattaaggtatatctttccactttagaatagaggtgtatctttcatacattttaaaggagtactctgacaagttctgtgaaataggttttttttaacttttaagtttaggggtacatgtgcaggtttgttatataggtatgagtcatgggggtttcttgtacagattatttcatcacccaagtattaagcctagtatccattcattatttttcccaatcttttccctcctcctacctcctcccaccagtaggccccagtgtttgtcattcccttttatgtgtccatgcgttctcatcatttagctcccacttacaagtgagaacatgcggcatttggttttctgttcctgcattagttcaccaaggataacagcctccagcctcatccatgttcctgcaaaggacatgatctcgttcttttttacggcttcatggtattccatggtgtgtatgtaccacattttgtttatccagtctaccatcaatggacattgaagttgattccatgtctttgctgttgtgaacagtgctgcagtcaacatatgtgtgcatgtgtctttatgataacaatttatattccttcgaatatacccagtgatttcactggattgaatggccgttctatttttagatctttgaggaattgccacactgttttccacagtggttgaactgattgtggaaaacactcccaccaactgtgtataagtgttcctttttctccacagcttcgccaacatctgttatattttggcattttattaacagcctttcagactgttatgagacggtatctcactgtgcttttgatttgcatttctctaaagatcaatgacactgagctctttttctttttttttttttttaattttgctttaagttctgggatacatgtgcagaacatgcaggtttgttacataggtatacatgtgccatggtggtttgctgcacctatctacccgtcatctaggttttaagccccgcatggattaggtatttatcctaatgctgttcccacccttgccccccccatcccccaacaggccccagtatgtgatgttcccctccctgtgtctgtgtgttctgccattgagctcttcttcataagctggttggctgcatgtttgtcttcttttgaaaagtgactgctcatgtcctttgtccattttttttaatagggttatctgttttttcttaacaaattaatttaaatttaattaattaaatttcttaacttaaagttccttgtagatgctgggtattagacttttgtcagagacatcgtttgcaaaattttctcccattctgtaggttgtctgttgactctgttgatagtgtcttttgctgtgcagaagctctttagtttaattggatcctgtttgtcaatttttgcttttgttggaattgcttttggtggcttcatcatgaaatctttaaatctttgcctatttctttatccagaatggtattgcctgggttgtcttccaggtttttatagtttggggttttacatttaagtctttaattcatcttgagtgaattttcttatgtggtgtaaggaagggatccagtttcagtctttgcatatggctagccagttatcccagcaccacttattaaatagggagtcctttccctattgcttgtttttgtcagttttattgaagaccaggtagttgtaggtttgcagtcttatttcctggttctctattatgttcggttggtctatgcgtctgtttgtaccagtaccatgctgttttggttattgcagtcctgtagtatagtttgaaatcaggtagtgtggtgcttccagcattgttctttttgcttaggattaccttggctatttgggctctctttttggttccatatgaattttaaaataattttttctggttttgtaaagagtgtcattggcagtttgataagaataacattgaatcttaccaattacttttggcagtatggccattttaacgacattgattcttcctattcatgagcatgaaattttttttatttgtttgtgtcatctctgatttctttgagcagtgttttgaagttctcctgatagagataattcacctacctggttaactgtattcctaggtattttattctgaaatagttttttaatcacaattctggttttaaatgatcctagagatggtagttaatgcttatatacactgtagtatacccagtagataactaagtttattgactgactgatttcaagtgtagagagtgtctgaaataatatcctctggatgtatgtccaaagaacatttgaggtgacaagccatgcattgattgggaacttcatataggcagaatcttgtactattctgttaagagcagtgtttctcaaactttttggtcccgggagccttttatactcataaaaaaattacacaggcggctatggctgtccctgtaatcccagcaccttagaaggccaaggtgggaggcttacttgagccagaagttcaagaccagcctaggcaacataggcaacatagcctaggcaacaaccctgtctctacaaaaaaatttaaaaattagccatgcatggtggtagtcctagctactcaggaggcagaggtgggaggatcacttgagcctgtgaggccaaagctacagtgagccatgagccattattgctccactgcactccagtctgggtgatagaaggagaccctgtctcatttttaaaaaattattgagcttatatttatatgggataaattgatattatcatattagaaattaaaaataatatgttaaatatactttgtttaaaataatgttttaaaataataatagggattgttgaaataactcatttattcatttttttataaataatagacccattacatgttaaagttatgtaagctgtggaaaattccactgtacacttgtgaaagaatgagagtggaaaaaggcaaataacctcttagtactgtaaatatagttttgactttgcaaactccaagaacatatctcaagaatctagggatccccagatgacgcttttattttattttaggatcacaatgtttaaaaacaagttttgttggctctacacctccaaagagctcccaaatccaactacttttcacctccttcaatactgcctctcactgagactattgcagtaggcgagcttagtggctctcacagtgtggtcctgggaccagcaggagtggcattatctaggaagttttcagaaatgcagattctttagccccattccacacctactgaatcagaaattctgagaatggggctggcaagccgtgtcttaaaccttgcaggtgattttgcagatcacacttttaaaaccactagtttagaggatgtcattgtaattgaagataagctttatgcctcaaggtccatcagtctatttacaaaagtgcaaaaatgcgtagtttgagagctggttacatgttattcatgaacatgatttaacaatacaggcataattaatttaacaggtgccttaatagtaactgcagttgtttgatgataatggtagtcttttgactgctgaagcagaagttgggataacatctccaagtgggatattaacatcaacattgcttcattagttaaaaagtcctttttttttttcactcttcaagacagctgttttgaacaactgttctacaaaaattgatatttccagaaacccggcccaacgggggagaggtcatgtgagtcaactgtccaaagcaacttaacagattcctagctgtcaaccatccaagagcttgaatactaatgataaaagtcatagaagattgtgtactagtacagagtatatagctagctaacctactacaagcgccttttctagtcccaaagcctaatgtctttgatagatattaatttgaattaatttaactaataaagtttttaacttaaaattttaaaattaggctaggcatggtggctcacacctgtaatcccagcactttgggaggccaaggtggagggatcacctgaggtcaggagttcgagaccaccctgggcaacatggtaaaaccccatctctactttaaaaaaatacaaaaattagccaggcatggtggcgtgggcccatagtcccagctactcaggaggctgagacttaagaatcacttgaacctgggaggtggaggttgcagtgagccaagatcgtgccactacactccagcctgggcaacagtctcaaaaaaattgttttaattatttttggcttcatgtttttaaatttaatcaccattaggttaatgtggagttatgctaaaaattatccacctgaaaatgtccactctttctgatcatcttaatgaaagctctctcattccgcagagaaagatagaaactaagtttgctgcctattacaaggaaggaagaaatagtttatttttatggataaatgtaataaatcttatgatggattatataaagggaaccaggaggagttaaaatatacaaggcaaattgtagcatagtgactttgaatggtagctacgtgggttaaattaacaacaaattattaatattgagaccctaacctgcctggtcttaagttacaaccacactcttctacttgaagaaattatatattgctaattaaaacttcatttctcaatatatggtggtttccttagaacttttactaaatctcattacataaaaagccattcagaggctttgtgtttagttattagctactttaatagacactaggttggagggcatatgtacaaatgatagtctgattcattggcagaatttatgtgaaattggccctgccacagttaacttggttttatcaaagcaataaatttaatttttatcaaatctgtgcttcacaccatttatgagtcccgtactgttctgaaacaatgaatcctttatgatgatgactaagatgcatgtcatgaagctaaatgctcttacattagcctactgagtcacacatccctgaggttgcttagtcatcttgatcattgcctggctggctctcacatttacaagggaatatttccatcagtcttttctacctcattgttcattatttcatccctacaagtaagattaaattttcttaagtagattcaaaacccaaggataaggttgcatgcacataacttcctatagtaaatattatatgggtagattgtaagttttagttgtatgaggttgttcccctcacccccaaccagctcttctgcagagaagactgtgaagtaacatgaacaaaactctcatcatgacatctaactctgcaagatatctcactggaaatactttaaaatgccttgagtgcagtaaagaaaaataacacactcttaacctattttgatgttttgatctaaattaaagaataaacttcccaattaatcttattattttcctcaaaagtgactaggtctattaaagtaaccataatgccaataaatttacttagataagactttgcaaaaaaattttgtaattcagtaaaatgatctaagttttttaatcttgtagtatataaaaggtttgttgtgaaataacttccccagatgctcataaaattacagaactagatgatttcattttaaggccacaaacgaaaggctatttcatcaatgagagttcactttaaaatgttttatcttaaatttcaacgaattaaaatacccagtttttatattcccaaaaataaatgttgtatatcaccttaaaagccaacactctaagagcacaatacttaaaacaactgtattgccatagttataaatattttatcaaatatttcctattttaaaacctttactgttttatgttttctctacattttcaggtattaaatgtgaggaagcatataaaaaagcagcaacctttgggagaattgggttttccctttcttttttttttttttttaactgttctccaaagatctttgttctctttctgaaaattccactcagcagtgactgcagatttttctcaacaaatgttttcccataagaccaatgtcagaaagctgaaatttaatatggaagttattcaaagattcaaagtaagatttttttcagagtaaaataagccttcccccttttttatccccacattaatagaaggcaatggactttttaaaacactaagacaaatgttaacagtgagacactcttcaaaaggtgtaaaagtgatagcatacatttattggagttcttactctttgtgggcacagtgcttagagctttaaacatattcttatttaatcctcacaactctttaagtagtggtaataaggaaactatgtcatagacaacttaatataaaaagcaatcggtaatacagtaatagcagtacattggcttatggtagatactctgtactctgcggtattggagatggcaaagactgttgaatatttcagcaggagctgtggtcagagaggatacttgattcattcacccaaaccagcttcgactcctctcttcctaaatagtacttcagttttcctctcacttgagctttaaatcttggagtcagcattgaagcaccatctacattatctcctatatgcagtcaggaccagaccctgagggttcagctctcacagagtttctcacattctttccatattctccattctcaatattgctaattagcttgcctccctcctctggtctttccatcttcttctttttttttttttttaacttttattttaggttccggggtgcgtgtgaaggttcattacataagtaaacttgtgtcacgggggtttgttgtacagattatttcgtcaccccggtattaagccgaagacccatcagttatcttttctgcttctctggtctttctgtcatctaatcagtataatgcctggctgccaaagtaatctttctaaaatgcagctcagaatcatgtcatttctctgtcttaagttatcattgccagcatccttgttcagttagtgtgcaggaatagaaattagcaacatttaaaagcagttttgaagaaaacaagttacagtttattacctttaaaattaactcattgatacttaagaaaagctaaaaaaaaaaaatttaaagaatagacactgccagatggacaatgaaatggaacatgtaatggaaaagaactaaaggaacagagatagtaagataatgtataagaacatgccaacacaatgcttaatgaattttattaattcagcaaaaaaaaaaacaaagactaaaattatttctatgccagatgagtcatcagtatttggcatcagtatttttagtacttaaaaagaggtaacaggccgggtacagtggatcgtgcctgtattcccatcattttgggaggctgaggcaggaggatcacttgaggctaggaattcgagaccagcctgggcaacatagtgagacctgtctttacaaaaactttaaaaattagccatgcacggtggtacacgcctgtagtcccaactactcaggaggatcacttgagtccaaggctgcagcttcagtgagctatgattgtgtcaccacactccagcatggctgacagaatgaggacctgtcttaaggagaaggataaggagaagcaacagagtaacaaggcaatctatggaataggagaaaatattttcaaaccatgtatctgataggagttaatatccagaatatataagaaactcctacaactcagtagcaacaaaacaatgtttaaaaatggacaaaggacttacatagacatttcttcaaagaagacatacaaatagccaataggtatatgaaaaaatgctcaatatcacttattgtcagggaaatgcaaatcaaaaccataatgagatagtacctcacacctgttaacatggccattatttaaaaaaaaaagaaagaataacaagtgttggtgaggatgtagagaaattggaaccccatacactgttggtgggaatgtaaaatggtgcagttgctatggaaaacagtatggaggttcatcagatatttaaaatagaactgccatatgatccagcaatcccacttctgggtatttttccaaaagaactgaaatcagggtctcagagatattttcactcctatgtttattgcagcattattcacaattgccaagagacagaaactacctaaatgttaaaggatgaatggatcaagaaaatgtggtctatatatcaatggaaaagagatcctgtaatatgctacaatatgaatgaaacttgagaacattctgctaaatgaagtaagccagtcacaaaaggacaaatatgacatgattccacttacatgaggcatctaaagtaaccatcagaatagaaagtagaatagtggttgccaggagctgggggaaagaggaaatggggagttcctgttcaatgggtataaagtatcaatcatgaaagatgaaaaagttctagaggtctgctgtacaacattgtgcttatagttagccatgctgtactattcacttaaaaatttaagagggtagctttgtgctttaattagcctctccccctatggaagaacaaacatcaggagtaggcaacagatggcactgaaacgtgaaggtgaggggaagtccatgatgctgccaagactcctgaaagtgattgagaaatgtgtaaagtgaaaagacttgagcagagttcgtcatcaagaatgggaagacaggatgaaagcatgaccatcactagcatttactgagcatttactatgtaccaggtttcatgctaataactacattatcatgacagccccatgaggtatatgtatccccttttacagagtaagaaatcaagatggagagaggagttaagtaatttgcaaaaggtcacagagttgttatgtctgagcatataacctaccctgatataatacctgtggttaaatgatcttaggggctataaattagaaacagaggattgtgacccaaaggagaggtaaattaagatatatagagagtgtagctgatctagtaaaaggaaaaagctctaagccttgctaggaaatactaaactcctgaaaccccatgcttttatatagcacctgtcatatcacataatgttttcaaaggactgaaagtcttagactaggtgcagcaatcctcactggtgagcactgtacagaaaggacacctcaacaaggaacatagtgttttcaaaaataaactgattgttcccaaggagtcccccccacccatttttaacttttattcccctatgtcttatgagtgagataaaagttttagatcaaattctagaaaggtcttagattgagaatcatcagctctagagagttcttttcagagacatgcctgacttcattgaccctgttttttacgaaagattatggggaagtggggagaaatgaagtggcaaagggattctgtgaaggaacaagggaaataacatttgagtcatggttagttcatagtcagtatcactcaattctcatatgtttaaaatctgattcacgtaaagctttttttagcactaagaaagaatcttaaagatttcatccaagtcctttgtttcacatttaatgaaactgcctccaaaagcagttaattccacttgcccagggtaatagaataataaaccatgaactagaatccagatctaacttagttcatttctctcttaccctctccacgattctgttacactctcgaatttcacagatttgccaaatctcaggatgaaatgtacttttcagtctaaatagttaaaactaaaccccagatatgttttttaattgttgggtaaaaaagtaaaacctagtttttttttaattcagtttaggtattgacctactctctatatagaatagactgtaggctgccaagtaaatatcatatcttcttaattattgaggatgtctgctaatagtgaaggttgatcctttccctcctctttttaaaagagttgcttttttaagagtccttcccaccatcctttgtagtaattaattactaagatatgatgaaaatatctgtctcctagcttagtcacttttgttcttgctttctcccttttttctttccactaaaaatgacttgtttaaatacatctgttacttctttgtctgattctgtttattagcagaaatctgatagggttagaaaaattgctaggtagattttatgtaatactgatctatagggacaggttgctctgctgaatgcttctggaacttcagtaggtcttttttactttggctaacacctacctataaataggtagctatactggctgtactgtaagaactacttgctgagaatttttaagctaaaaatattcctctcagagttaatgaggtaaaatcatcatctggcacctctggcctgacaaatgaatgcgcactttgctaaagcattttaaagccataataaaaacatgtctgaattccagcttttgttagtggaagaattgcctttttggactaagccttccatggataacaattaagaattatgaacaaaatacaaaaaataactatttgaaggcactggagagtggcagaaagcagatggaagtgggaagtgagtttacatttgaaatatagggaccaaaacttatatttggaatataaggacaaacttgtattttcaagtttgtagcattttgcttaaggactctttccaatctgtggatggcttcaggtggcagaaagccacagctttacttacttgaagtatcaaaggacagaatcccaaagctggcagaatactggaaagttagcaaggaatttctaaaagaaagggagctgcagaggcggtaggtcccaaaatgtgtgtgtaagccttgccccagatccttggctgactactgaaccatatatgtatagaagaaatcctaataagctctgcaaataaagaaacacccagaagctgaaagaacttttcagctgcttattataaccgaagagaatttgaatccggctaagttaacttgaacaaaaatcagcatacttgaacaaaaatcagcatacttgagaggaacataacagaatccagaggttctaaaatgtatctgttaaacccagtgtaattgaataatgtatcccaaaaattcaggtccacccagaatctaagaacgtgacctttttggaactaagaccttgcaggtgtaattaaattaaaatgagatcacgctaaattagggtgagccctaaatccaatgacggtattttttaaaaagaagagaagtcacacagaagtacacaaggaagggggccatgtgaatttggaggcagaagttggagtgatagagctgtataagccaaagaacaccatggatttataggagctaccgaaaactaggaagagggaaaaactttcttgagcctcagagggagcatggccctagggacaccttgattttggacttctagcctccagaactgtgagaaaataaaatttggttgttttaagccacaaagttagtggtaacttgttatggcagccctaagaaattaatacacccaatgtagtaaaaaggaaggaaatattataataaagataagagcagaaatcagtggagtaagaaatagacaaacattagcaataatgaacaaagccagaattcgttatttgaaaaaataaaatttatgaaccccataaataaaatttatgaatcttaatattgcttaagaaaaatgggagaaaacacaaattactaatatcaggaatgaaagaggagatatcactacacattctacagacatagaaaggataataagaaaatataaagagatattatatatgccagtaactgcaacaacttagatgaaaataacaaatttcttgaaaagcacaacttaccaaaactaacacaaggtgaaataaaatatctcagggtctctatttcctttgagaaattgaacctgctatcagaaaccatccaccaaataaaacttcatgatcaagtggtttcaccattgaattctatcaaatatttaagagtaggtggctagatcatctgacaggtatatgtttaactttttaagaaactgcaaaatgatattcaaagtggttgtatcattttcgttctcactatccatgtatgagagtttcagttcctccccattcttgttggtacacagcgtggtcaatcttttaaacttttgatattctactactatgtagtgatgtctcactgcgcctttaatttggatttactagtaactgatattgaaaatcttcctgtgcgcctatttgctatctgaacatcctctttaagttgtgaaactttttttatctagtttggatgcacgtcctttaacagatacttgatttacaaatattttttcctcgtttatgacttctcttttcattctcttaacagtgtcttttgaagacagaagtttttagatgtccaacttgtgaatttatgtcttagaggactggccttttagtgtcgtgtttaagatttctctgacaaatgaaaggacacaaatattttctcctagaaattttgtagttttatgttttacatttaggtatctgattgattttgagtaaatttttgtatatgatgcaagatatgtgtcaacattctttttcttttcggtttcttctttttggaggggaagatacggatacctagttgttcccgcaccatttgttgtaaagactattcatctactggattccttttgtacctttgttaaaaattattcatccatagatatatagttctatttctggacttctgtttcacttatctaataatattctgtattgatactaataacatactttattactgtagctttatagtaaatcttgaaatcatgtcaacactccagtcttcttttttagagttatttcagctattctagattctttgcatttccgtgtgaagccttataaatttctacaaaaaaaaaaactgctagagtttttatggagattgcattggatggatggatggatggatggacagacgtacagacagatcaatttgaggggggaagatagataatttgggagaaaattgacttatcagtattgaatcttccaacctatatagtatatctctgcagtcatgtagaccttccttaatttctatcagctgtattttctagctttcaatgtataaatgttgaaaatcttttatacttatccttcagtatttcatatttcttatgctattgtaaatgatattgcttttagcttaatttctaattgttcattgccaatatatagaagtacaattgatttttaccatgttgctcttgtatcctaaaaccttgctaaactcacttatgagttctaatgactttttttaatagattcagtaagattttctgcatagatgatcatgttgtctgtaaataaagataatcttagttcttcctttttctttttcttgccttattactctgactagaactagtacaatgttgagtagaaacaaagagagcggaaattcttgctttttcttggtcttaggtggaaagcattcagtctttcaccattagctatgtcaatatgttctccatagatgttccatatcagattaaggaagttctttgctgttgttagtttgttgatacttttttttcaatcaggaatttatattggattttgtcagaattcctcaacatcaatagaagttatatttttcttttttagttaaacattgcaaatcacattgattgatatttgaatctaacttcgcattcctaagagaaaagctacttggtcatgactttttaatatattgatggattcaatttgctgcaattttgtatttactgttctgtatttatgttcatgagagatactggtttctagggttttttgatgtctttgtctggttttagtatcatggtaatgggaaagtattacctcctctttacttttttttaaagcatttcatttgcgttccattcaaaatactttcaaatttgtcttttgactttttctttgatttacatgtatttatttctggggaacttccagatatatttctgctatcgattccaagtgtaatttcactgttatcaaagaacatgctttgtatgacatgatttcttttaaatttatacagaattttttacggcccaaaatatagtctgtcttcataaatgtttcatatgcaattgaaaagaatttgctattttacagtagacacttctataaatatcaaataggtcaaattgtttttttcaagtcttctatatccttgctgattttctacttgttcgcttaattattagaagagagacattgaaatctttagctgcaaaaatggattttgtggatttctgtattattccttgtagtttttgctctttgtgtttggagctttgttattagagcgtgtatttaggactgttatgtattcttgatgcactgacccagtgatcattagggaatgacctttttttaatccttgatgatactctttgctctgaaatcactttgtctaataataaaaaccactccacctttctattatttgtgttagcatatattagttatctttgtccatacctttaattttagcctatttgtttatttatatttacagtgagcttcttattagcatcatagtgatgggtcttgcttttttatccaatctgtctttggcttctaattgaaatatttagatcatttacttttttttaattaggggaggtttaaatttatcttcttgctatttgtttttcatttatcctatctattccttgttctcatcctgcttttctctattttgctatcacattttgattatttgtatatttttatctccttagttaattagctgtactctttgttattgtttgttcactgtatcatgtatactatgtaggtttaacttattacagtgtacccttaagtgatattacaccatttcatgtatagtataagagcattacaatagttatgtcaggagtgcccctcagttcacggattccctgggaagactcacaggactcaacatatagtcattcccacagctatgctttattataatgaaaggatacaaaggaaaatcagcaaagggaaaagccacatggtgcaagtctggaggaaattagacacaagcttccaagtaccctccccagttaagtcacacaacatacactcaattcctccagcaattagttgtgacaacatgtgtgaaatattgtataccgggaaaacgcattagtgattcatgacccaagatttttattggcgtgtggtcatacagacccccaccttgcctaacacataccaaaattccaggcagccagaaggggagcaggtaaaccacattgtttatacaaactgtttaggtacaatgagccgttcttaccagttctgggaatggtaagaaccctcctgaaatccaagttcccagactcctgccaagagtcaaccttgtaagcaagctttctgaggggagcagcctcagacctgttatattaattatttctgcaccatgtatatttccatttgtcccctcccaacttctatgttgttgttgtcagacattttacttatataaatgttatataccccacaatacagcagttagttatcttttaaagagttttaaccaataagataaaaatcttatgtatttatccatgcgttaccatttctggtgctcttcatttctttgtgttaatccatatttgcatctgctgtctttccttctgcctgaaggacttcctttaacatttcttgcattgtggatctgctagtgattaatttattcagcctctatatgtctgtaaaggtctttattttaatatgatttttgaaatatttgaaagatgttttcactgggtaaagaattctaagttgacagattttttttcctttccataatttaaaactacagatccactgccttctcacttgcattatttgtgacagggaatctgctgtcattctttcctttgttcctctgtacttaatgtcatttcttctctagctgcttttaagattttctctttatcactgttttgatcagtttgatgtgccttagtgtcattttattcatgtttcttaaacttgaggtttattgaacttcttggatcagtgggcttatagttttcttcaaatttggaaattttgtagccatagtttctttaaatgtatcttctttcccccaccttcagagactgcaattacaactatatttgtccacttggagttatctcacagttcactgatgcatttttattttggagggtccctctgtgtttttaattttgtatagtttctattcctttgtcttgaaggtcattcatcttttcctctgtaacgtcaaatgtgtcactaattctatctagtgtatttttcacttcagctgggtgtgtgtgtgtttgtttgtttgttagttttgagatggagtctctctctgtactctttgttatacacccagcctggagtacagtggcgcaatcttggcccactgcaacctctgcctcccgggttcaaatgattctcttgcttcagcctcccgagtagctgcattacacccagccgccaccacacttggctaatttttctatttttagtagagacagggttttgctatgttggccaggctggtctcaaactcctgacctcaggtgatctgcctacctcagcatcccaaagtgttggaattacaggtgtgagtcactgcacccgccctcatttcagatgttctaattttatatctagaagttcaatttgagtcttatagcttccttgttcataccttttgagcatatttaatacagtaataatctgttttaagatatttctctactaattctaacatctgtcttatttgtcagtttcaattgattgattttgtttctcctaaatatgaatcatattttcttgcttctttgcatacctgataatctctttttggttatctgatgttgtgaattttagcttgttgggtgttagaaatttttgtattcttatacatattcttaagcttttttctgaaatgttatttgcagacaatatgatcagttttctgtcttgccttaatcatttgttaagcaggaccacagcagcatgtattccaggtctaattgtttggtacttctgagataagacccttctgagtattctactgaatgtcctgtatatattttttttttttttgaggagtctctgtcacccaagctagagtgcagtggcatgatctcagctcactgcagtctccatctcctagtctcagcaattctcctgcctcagcctcctgagtagctgggactacaggtgagcaccaccatgcctggctaagtttttgtatttttagtagagacggggtttcaccatgttggccaggctgggtctcgatctcctgacctcaggtgatctgcctgcctcggctccccaaagtgctgggattacaggcgtgagccactgtgcctggccgaatgtcctgtaaatttttccattctggctggtaggaacaggtactatttctggccctatgtaagaagcagatacttttttttctaatcttggatagatcttttctcagccttggatagtttcctcacatacacatgccagtgagtactccattgatttctcaagggttaatttccacagatctccagaattatttctgcacagctttcttcttcccagaactctgtcccttgaattctcactgccttggtctcctgggattctcagctccacctcctcaagtaagggaatgtgtcagattctgactgggttctctctctttgcattgtttaatctctgtgtattttggaattttccagctatctttctgttattggtttctaataattccattgtgatctgagagcagatattatatgctttctattttaaattcattaagatctgttttatggttcagaatgtggtctggtttggtaaatactccgtgtgaacttgaaaagaatgtgcattctgcccttgttgggtaaagtcatctatggatgtcagttatattcaggtatttgatggtatcgttgagttcaactgtgtccttactgatttttctgcctgttggatctgtccatttctgttaaaaggatgttgaaatctatatatgagatctataaggatcttcatatgtttttggagaatttacccctttatcattatgtaatacccctccctgttcctaattgttatctgttagatcaattcagaataaaaaaaaaataaaagtttgtatcttaccttcacttattccttctttagtgcttttccttcctttatgtagattttagtttctgacctatattattttcccactctaaagaacttttcttaacatttcttgcaaggcaagtctggcaacaaatttcctcaatttttatttgtccaggaaagtctttatttctcctttacttctgaaggataatttctcagggtacagaattctaggttggtggggttttctctcaacattttaagtatcttactcccctctcttcttgcttgcttggtttctgagaagtcacatgtaattcttatctttgttcctctatagatgaggcattttaaaaatctggcttctttcatgatttgttctttatcgtagtttcaaaatgatacgcctaagtatagcttagggggcatttattatggttgatgttctccgaccatcttgtggtttgctgtctgatattaatttggggaaaattctcagtcattattgtttcaaatatttattctgttcctttttctcttttttctccttctggtattccccattatgcatatttacaccttttgtaattgttccacagtcattggatattttattctgggtttttttcagtcttcgttctcttcgtttttcagttttgaaagtttctgttgatacatcctcaaaatcagagattctttactctgatttttatctattaatagaccacatacagtccattaatagtcccattaaaggcattcttcacctcttttgcagtgttttttaatctctagcatttctttttggttcttccttaggatttccatctctttgcttacattacccactattgttgcatgctgtctactttatccattagcgcctttaacgtgttaatcatagttgttttaaattccctgtctgtgtgttacatctctgccatgtctggttctgatgctcaccctgtctcttcacattgtgttctttgccttttagtattccttgtgcttttttcttgatagctggatatgatctactgttttaaaggaactgctgtaagtgggcctttattattaatcatgtggtagtgagctgtggggatgaggaagcgttctgtagttcagtaagtaggtctcagttttttagtgagcttgtgcctctgaactgtaagcttcataagtgttcctcaggtattgttttccttcccccccttcagtgggagaggaggactagagtgggagacagttgggtatttcccttctcccacaaggaatgcttcccttcagttaggcactgataatactccagcaggttgggctctggtgaactaggttcccctgagggcaggccttgttaagagcattgtgctttggcatgtttcaaaatggttacttttccccttcttctgctagaagcttgaggggatttttcttcagtatttactgtgagaacctggttgggctcctagaggtaagtcacacaaaatggtggcggcccccatctctgagtgcccctggagttgttaactctcagacttgtccacatggagcctccagcaatttgtcagtagcaagtcaggttttcctaccctggctctggttcccactgcattttccactctggtaagctgtgactccctgactgtactcagtgatttgccctgtgccctcacctcttatggatcctggaattgttgaatttttagtctgttcaggtttttacttgttgttaggatgaagtggtgacttccaagctccttacatgtgaaactggaaactggaagtctcccttcttacattgtggcctggaaatgctttcaaggcaataagtgggcagtcacaggatttgcctcatttgttttccatctgaggaaccactgtttttcattgccttatgtctgctgtcttaaaacctattgtttcatatattttgtgtaaaggtttgtttattgctttaggtgggagggttaatctagtgccgcttactccatcttggccagaagtggaaattcatgtcaaatttttaagaagaatgttatagatggagtagaccagaacataaaccagtgtctcattagaaggtaaccgtcttggtagttagaattaggttctccataagctacaatgcatattgtacttacaataatgaagagttaaatgagtcattgtttacataacaataaacttaacatgtaacattagcaagactttagttactaaatggatggatgtggatccagccttctcaataacttttctaaatgaaagtgagtcttaaaaaaaaaaattcatactgtcctctctaaatactaactctgaggcattttcccccttcccccagcttcctataggaaatactattcaccgattataagtgccttggctagtatccaagtcttacctgtgacatgcacagagcttggaaaatggtttttcttccctctcgttatttaatagtcttcttgtttatgacagtagcctttaaacagggaatgtgttcctgaaagatggcaaacaaatgatttcattttcttttattatatagtacagagcagtgattttcaaaggctgggtttgcatccttaactgtcttcccctagccttcctgttctaccaaaaccaagtctatacacatttctctgcagttgagagtggaaatcatattagctttattcacaaatccgtttactaaacattatggaatgtacataccctctgacaagaactggaatgtacataccctctgacaagaactgtagtaacactaggttggatgattatggtggggtgagttaatgagatgcaagggtagcagtgtagggatggacatcatcatgtcagatacaaatatttggtggctttatacaaaagaaatgtgagagatgcaagattatccattaaaataaaagcaaaacatcttgagaacctaaattatatggctatcattcattgagaacttcctaggttctgattaaggacttaacatacatttcctcgtttaaccttatcaggtagatgctcttattatcctcattttacagatgacaaaacaggcttagagtgaaccagcaacccctccaagattacagcactataaacaacagtggaatgggaaaagaggaaagggattatatctaagagatattcctcaagaataattgataagacctgtgacaaattagttgtaatgattaaggaggaagaaattatgggtaagtcccaagtttctatcttggaagaccagacagatggtgatatttcattaactgtggtaacaaatggaaaagaacgaatagattaaggtaagcgagataaatttagctttaaacattttaagtttgagatttctattggatatccaagcagataactcttctaagttgttggaaatgctgtacaggaatgaggtctagaatagaataaacttgggcaccatcaccacttagattgtgtgaaagacactagtgtcttcctttgagattgataagaaaaaaacaataaaatatagaacctaggattggcagtattttaaagatgggcagaaagcaggagtcattaaagatatatcaggaggagaagacaagaaaagaactggaagaaagtgtcgtcacgttaagcccaagaaaggaggctatttcaaaaagtggggatgggtaaacagtgtgaaatactaaaaagtgattaagaagcataaagactgaaaataaataatttgatttaacagaaagtctttagtgactttaactaaaacaattagagcagaatattttgggtggaagccaggctataaattattgctatgaaagtgaaaattgcaaacatggttctttccaaactttgggtggtaaaaggaagaatggagatgaagaagcagcatcaaagggaagatggctcaaaaagggccaatatgttttggtatcctttttgtttagttttgttttaaataagtgtgtgtgggatggggtgattatgattacactggatgtctctgttggcttgatgatatggatggtgataacagctaacacagttaacagccagacactgtcctaagcacatcacatgtattaactcattttatctccatggtatcattaaccctattttaaacatgaggaaactgaaatatcaataacataagcagctagcctaagcttgcacagagatacgatgcaaactgaggcagcctgactccaagtccacagtttaccctccctgctatatgcttccctgctcacccaaaaaagcgattctgctttatttattctaattttctttacagaatgtatctagagtgaacatttttcagaccattatctttagagtgtgttttaggacctgattcaaattgctttccgttcttcaaaaacttatttcctgggataggaatagctgcccactctagtcctattcctgagcaccaagaataaacagacttgactcttgtaaatggaagaatgagtttcttctagaaactcagtagaaaaatgagctcctactatggccttaagtattaagaaaaaataagtgtgtgttttgccttttgtttggtgctaatgtgataccaggttttgtatgaagcacatgtgttttccctgttttatgtagagaatagcatgcatggaatgaaccccaaaaataagccccaaattatcttttgctcaaaggaacagaggtacttcgaggctagactttatagtcattatagaagaatgtgaggaaatacaactctgcttttatttgcaccagactttggctgtgttacactttcttctgccagtcctgtgactgacttctctttaaatgattcatggttgttttccatgaataaatatgcattagtcaagatccagttagagcccccacttccccttcccctcttttccctagctgcagctgtttatatttgcatttgactggacagatctgttagccttaatgtgtttttctttgtttattaaaggtttacactttgccttagttgaagaaaggtaaggattttttttgtttttgttttttttcccgtgggtgcccgccacccacccacccagagtgcagtaccataatcacagctcactgcagcctcaacctcttggactcaagctatcctcccacctcaggctcggactacagccacatgccaccacacccagctaatttttgtaatttttgtagagatgaggttttgccatgttatccaggctcatcttaaactcctgggctcaagcagtcttcccaccttagcctcctagagtgctgggatgataggcatgagccactgcacccagcccctacattttctttataagcctagatatataattacaattattgatgatctcacagaaactttcctagaaggaattcatttgtctgccataagcctaatttacattgaagagatagacacagtgattaaagactggaggagttcttaaatccttaaagaaactactaggccaggcgtgttggctcatggctgtaatcccagcactttgggaggccagagctggcagattgcttcagttcaggagttcgacaccagcgtggtaaatggtgaaaccctgtctctacaaagaaatacaaaaattagcccggcatggtggcatgtgcctgtgtcccagctacaggaggctgaaatgggaagattgcttgagcctgggaggttgagactgcagtgggctgtgatcacaccaccgcactccatccagcctaggcgacagaatgagaccctgtcttgaaaaaaaaacaaaaagaaactgccttcccaagtttatcttttttgtatgccctattagaatgcttttcctttttatgtttttccccattttattagaaaaatttccagatatacaaaatggaagaattttacaacaaacactcatatgcccaccaacttgatttcatcataaacattttactgtcttattttatcacatctgttcatctacctatctctttatgcacctatcattttttatgcatttcaaagtaaattgcaggtattagtatactttactggaatgcttttagaagggtggagtggtcttcctgctctgttgctgccttggctgtaccattttctgggtgctgcggataagaaagtcacattctgttgctaaatgatatggattagttcatcttttttccttagctcagctatagttgggatgataacttgtcactgaattccttcagtggtttctgccttagaaaatctcttggaaaccagcagatattcaaaataaagaaacatttatttaggcatgtgaaccccacagagaatattcattacattcatccccgtaatgcaggccaacagtgctttcttgttcatatgttctaaatttatagtcgagtacatagaaagtagggctttcttttatcatattgatctgataaaagccctaggttttgaggtacagaaaccatccatttctgggctgtacagacaccatttttggtgtctacagttgttttgccatatggtactgggctaattttgtctgtgttcctctcttgaggcttttgtgaattaattacgtttttagaaaattttttaaataactttttaaaatgtcaaagctttctcagtagaataaaatatgatgaggcattatgtcaacatgagaacaagttatcttaatagactatttctcagaaactgaggcctttgagtctgtacttattccatgttataaattagcattagtcatattcatgaaagcctcctttgaaacaacatgtaaagtaatcttggacctgaagagataagtctatttagaaagcaacgaagtctctgaatagttctccactctggaaaggtcatctctggccaagcatgaaaattcctaaagggaagtacaaagagagataaggggaaagaagctggcttagccagtcatataagcctaatcaattctggtcgtcagtgggataactcatgccacattcagatgtaataatcaaatcctttagaacaaatacaacataatataatagaaaaggcctggattttagagtgagaactaggttttgggtctagttcttaaactaactacatggccttacatccctataagactaattagacttgtccataaaaatactataagaattttatgaggggcccataattccgtttgtcaggagagcccacaactgaggcagtcctgggtgaggtttatctccctctttttacctccccaagtcatggagccagctgatctttctatttcctgtttcctgcctaagactactcagctagagctcagtgcatctgtctgaatgtctgcttttccatcaagggctctcagatgcccaagaaaccccctgagtggttagctacttcctgctatcaaatggcatcacagaaaagcagagtaagaagctctaagaatcagtccttgccctgaagcaaccattaagctggcaaaaaatgacaaaatcatctttttcagaattctggaatctaatcaaaacttaaagctacaagaggagtgcctaatgaagaaagaggttactcaatttcagcatttaatgaaatctgtcagatcactggctgaccactgagataatagaagagagacttcagtgactacacacaataaggagtagagtcattgcaaaaattgtttggaaaagtcactaaagggacaacagtagggccaaaataagcaataacagcaagccctgtgaaggaggcagaatctgatatccagacttaccacattataatattcagaaggcacagtttttgatacaaaatgacaaggcatacacagaaataggaaagtttggcctattcactggaaaaaataaattgacagaagccatccctgaggcagctgagacattggacttatcaaacaaagactttaaatcagctgtattaaatagggtcaaagagctaaaggaaaccatggatgaaaggataccaggagaacaatttatgagcaaatagagtatatcaacagagacagaaattataaaaaggaaacaaatagaaattctggagttgaaaagtacaatagataaaatttaaaattgaccagagaagttcaacagatttgagtaggcagaagcagaagaaatagtgaactcgaagataaacagttggaattattcagtctaaagaagagaaagaaaaaagaatatggaaaaatgaacaagcctacaagatctgtggaacatcatcaagtttgtaaatgtgcacttgagagtctcaggagaagagaaagtgaaagggtcagaaaaaaaaatctacaaaaagcaaacaaacaaacttgagctaataacatgaattcagcaaagttgctggatacaatatcagctcacaaaaagcagttatgcttcttctatatactgtattaatgtttaatgttgttaagatattggtactacccaaaggagtctacaaatacaacacaatccctagcaaaattccaacagcctgttgggcaggaatggaaaaggaaattctcaaattcacatggacttgcaaggggccctgaatagccaaaatgatattgaaaaagaacaaagttggaagtgtcaaacgtcccaatttcaaaacttgtcataaagctgtattaatcaaaacactgtgatactggcataggaatacacataaaagaccaatgtaatacagttgaaagtccagaaataaaccccatacatctatagccaattgcttttcaacaagggtgctaagtctaggaaagaatagtctcttcagcaaatggtactgagacaactggatatctacctgcaaaagaatgaagttggaccctacctcacaccatacagaaaactcaaaatgaatcaacaacctaacctacagataagagctccaactgtaagactcttagaaaaagagtacaggaaaaatcctcatgaccttagattgggcaaaagattcttagctatgacaccaaaagcatgaggaacagcagtaaccaaaaaataagatattttgaacttcattaaaattaattttgtgcatcaaaggacactgtgaaaaaaatgaaaagacagcccacaaaatgggagataatatttgcaaatcatgtatctgataagggtctagtatccagaatatattaaaaaaactcctacaagtcaacaacaaaaagacaacccaatttaaaaatgaataaatgacttgaatagacatttttcaaagaagatgtacagatgtctagcttatgaaaagatgttcaacatcatcagtcattagggaatgcaaattaaaatcacagtgagatactattttacaccccctaggatggctgtaataaaaacaaaaaaaactaacaagtgttaatgaggatttggaaaaataggaactcttgtacattgctggtgggaatgtaaaatagtacagccactgtggaaaacagtttagtggttcctcatatagttaaacatagaattgctatatgatccagtaatttcatttttaagtatctaccacaaagaattgaaaacaggtgctcaaatacatacacacgaatatacacagcaccactatttgtagtagccaaaggtagaaacaatccaaatattcatcagtggatgaatggataagcatcatggtatatatgtacaatgtatattattcagccatcaaaaggaatgaagtactgatacaagctacaacatgaatgaaccttgaattatgctaagtgagagaagacagacacaaaatgtcacatctcgtttgtgagatatccaaataaggaaatccacagacacagaaagcgaattgtttgccagagacgtgggaagggagcaatggagaataactctttagtaatatagggttttattttggagcaacaaaaatgttttggaactagatagaagtggtggttgtgcaatattgtgaatgtactagatgccattgaattgtacactttaaagtggttaattttatattaatttcaccttgattttaaaaaacttatgtgaagaatatatgtaaaaacctacaatcatgagatttccttttttatttatttattttatattattttaagttccaggatacaagtgcagaacttgtagggttgttacataggtatacatgtgccatggtggtttgctgcacctatcaacccatcatctaggttttaagccccacatgcattagttatttgtcctaatgctcttcctccccttgcccccacatcccccgactggccctggtgtgtgttgtttccctccctgtgtccttgttattctcagtgttcaactcccacttatgagtgagaacatgcagtgtttggttttctgttcctgtgttagtttactgaggatgatgtcttccagcttcatctgtgtccctgtaaaggacatgatctcattcttttttatggctgcatagtactccatgttgtatatgtaccacattttatttatcaagtctatcattgatgggcatttgggttggttccatgtctttgctattgtaaatagtgctgcaataaacatatgtgtgcatgtgtctttatagtaaaatgatttctattcctttaggtatatacccagtaatgggattgctgggttaaatggtatttttgggtctagatccttgaggaatcgccacactgacttccacaattttttaactaatttatattcccaccaacagtgtaaaagcgttcctttttctccacagcctcaccagcatctattgtttattgactttttaataattgccattccgactggcatgagatggtatctcattgtggttttgatttgcatttctctaatggtcagtgatgttaagctttttttttttttttttgtatgcttgttggctgcataaatgtcttcttttgcgaagtgtctgttcatatcctttgcccactttttggtggggttgtttgtttttttcttgtaaatttgtttaagttccttgtagattctgggtattagacttttgtcagatggatcgattgcaaatagtttctcccattctgtagattgcctgttcactctgatgatggtttcttttgctgtgcagaagttctttagtttacttagatcccacttgtcaattttggcttttatggcaattatttttggcatttttgtcatgaagtctttgcccatgcctatgtcctgaatggtattgcctaaattttcttctggggtttttatggtttagggttttacatttaggtctttaatccatcttgagttaatttttgtataaggtgtaaggaaggggtccagtttcagttttctgcatatggctagccagttttcccagcaccatttattaaataaggagtcctttccctattgtttatttttgtcaggtttgtcaaagatcagatggttgtagatgtgtggtggtatttctgaggtctctgttctgttccattggtctgtatgtatgttttggtaccagtaccatgctgttgtggttactacagccttgtagtatagtttgaagtcaggtagcatgatgcctccagctttgttctttttgcttaggattgtcttggctatacaggctctttttcagttccatatgaattttaaagtagtttttaccaattctgtgaagaatctcaatggtagtttgatgggaataacattgaatctataaattactttgagcagtatggccattttcatgatattgattcttcctatccatgagcatggaatgtttttccattcatgtcctttcttacttgagcagtggtttgtagttctccttgaagaggtccttcacatcccttgttagctatattcctaggtattttattctctctctttgtagtgattgtgaatgggagttcatccatgatttggctctctgcttgtctaatgttggcgtataggaatgcttgtgggttttgcacattgattttgtatcctgagactttgttgaagttgcttatcagcttaaggagtttttgggctgagatgatggagttttctaaatatagaatcacgtcttctgcaaacagacaatttggcttcccctcttcctatgtgaatacactttatttctttctcttgcctgattgccctggccaaaacttccaatactgtgttgaataggagtagtgagagagggcatccttgtcttgtgccggttttcaaagggaatgcttccagcttttgcccattcagtatgatatcagctgtgggtttgtcataaatagctcttattattttgagatatgttccatcaatacctactttattgagagattgtaatgtgaagggatattgaattttatcaaagaccttttcttcatctgttgagatgatcatgtggtttttgtcattggttctgtttatgtgatagattatgtttattgatttgcatatgctgaaccagccttgcatcccagggatgaagcccacttgattgtggtgggtaagctttttgatgtgctgctggatttggtttgccagtattttattgaggattttcgcattgatgttcatcaggggtattggcctaaagttttctttttttgttgtgtctctgccaggttttggtataaggatgatgctggcctcataaaatgagtaaaggaggagtccctccttttcagttgtttggaatagtttgagaaggaatggtaccagctcctctttgtacctctggtagaattcggctgtgaatccatctggtcctggacttttttcagttggtagactcttaattattacctcaatttcagaacttgttactggtctattcagggattcaacttcttcctggttcagccttgggagggtgtatgtgtccaggaatttatccatttcttctagattttgtagtttatttgcatagaggtgtttatactattctctggtgatagtttatatttctgtggggttagtggtgatatcccttttatcattttttattgtgtctatttgattcttctctcttttcttctttattagtcttgctagcagtctatctattttgttaattttttcaaaaaccagctcctggattcattgattgtttcaagggtttttcttgtctctatactcttcagttctgctctgatcttagttatttcttatcttctgctagcttttggatttgtttgctcttgcttctctagctcttttaattgtgatgttagggtgtcaatttgagatctttctggctttctgatgtgggcatttagtgctataaatttccctcttaacactgcttttgctgtgtcctagagattctggtaagttgtgtctttgttctcattggtttcagagaacttcttgatttctgccttaatttcattatttacccaggagtcattcaggagcaagttgttcaatttcctgtagttgtttggttttgagtgagtttcttaatcctgagttctaatttgattgcactgtggtctgagaaactgttttttattatttcagttattttgcatttgctgaggagtgttttacttccaattatgtggctgattttagaataagtgccatgtggcactgagaagaatgtctattctgttgatttggggtggagagttctgtagatgtctatcacgtccacttgatccagagctgagttccaagtgctgaatatccttgttaattttctgtctcgttggtctgtctaatattgacaatggggtgttaaagtctcccactattattgtgtgggaatctaagtctctgtaggcctctaagaatttgttttatgaatctggatgctcctgtattgggtgcacatatatttaggatagctcttattgttgaactgatccctttaccattatgtaatgccccctttgtcttttttgatctttgttggtttaaagtctgttttgtcaaagactaggattgcaacccctgcttttttttttttttttttttttttttttgctttccatttgcttggtaaattttcctccatccctttattttgagcctatgtgtgtctttgcacgggagatgggtctcctgaatacagcacacagatgggtcttgactctttatccgatttgccagtctgtgtcaggttttttgttttgttttgagatggagtcttgctctgttgcccagggtggagtgcagtgacatgatctcagctcactgcaacctctaactcccaggttcaagggatcctcctgcctcagcccccctagtagctaggattacaggcatgcgccaccatgcctggctaatttttgtatttttagtagagacagtttcgccatgttggccaggctggtctcaaactcctgacctcaggtgatccacctgcctcagcctcctaaagtgctgggattataggcatgagccactgtgcccggtcatctgtgtcttttaattggggcatttagtccatttacatttaaggttaatactgttatgtgtgaatttgatcctatcatcatgatgctatcttgttatctcacacactagttgatgcaatttcttcatggtgtcattggtctttatattttggtgtgtttttgcagtagctggtactggtttttcctttccatatttagtgcttccttcaggagctcttgcaaggcaggcctggtggtgacaaaatccctcagcatttgcttatctggaaaggattttatttctcctttgtttatgaagcttagtttggctggatatgaaatcctgggttgaaaattctttaagaatgttgaatattggcccccactgtcttctggcttgtagggtttctgctgagaggtctgctgttagtctcatgggcttccctttgtaggtgacctggcctttctctctgcctgcccttaacatttcttccttcatttcaaccttggagaatctgatgattatgtgtcttggggttgatcgtctcgtggagtatcttactggggttctctgtatttcttgaatttgaatgttggcctgtcttgctaggttgtggagattctcctggataatatcctgaagtgtgttttccaacttggttccattttcctcctttctttcaggtactccagtcaatcacaggtttggtctttttacatagtcccatatttcttggaggtttttttgttccttttcattcttttttctctaatcttgtctgcgtgccttatttcaacaagatggtctggatatcctttcttctgcttggtcgattcagttattgattcttgtgtatgcttcacgaagttctcgtgctgtgtttttcagctccatcaggtcatttatgttcctctctaaactggttattctagttagcagctcctataacctttatcaaggttcttagcttctttgcattgggttagaacatgctactttagctcagcggagtttattacccaccttctgaagcccacttctgtctattcgtccatctcatccttcatccagttctgcgcccttgcaggagaggcgttgcgatcatttggaggagaagaggcactctggccttttgagttttcagcatttatcattgattctttctcctcttcatgagtctgtctagtattgatctttgaggcttctgacccttagatggggtttttgtgggtatcttgttgttgatgctgttattgctttctgtttgtttttcttgcaatggtcaggtccctcttctgtagggctgctgcagtttgctgggggttcacttcaggccctattcatctggttcactcctgtgcctggaattctcactcgaggaggctggagagcagcaaagatgggtgcttgctccttcctctgggatctctgacctcaaggggcactgacctgatgccagtaggaacgcttctgtatagggtgtctgacaacccctgttggagattctcaaccagttgggtggcacggggagcaggacctgtttattaacaaagcactttgactgtcccttggtggacgggggtgctttgctgggtagggggccttgtctgggctccctggattcctcagaactatgcaggagcaaagactaagtctgctggtccatggagactgcggccacccttccacctagggactcaggcccagggagattagagttctatccctgagtccctggctggagttgttggagttcctgcagggaggccccgtgcaatgaggagggatgggtcaggcctgaagaggcactctgtccgcggtctgccacagccagtgtgttcagctgtgaaggacacctcttgggactaagccatccatcctcccttgctccggcaggggaaagcgcagcctggagctatagagatggctgccgcccatcccctgcccagggagcttagtgtgttaggcagctatcagtcctattgttcgctgttgccccttccccaaggagctcagatggcttagacagcaggcagctgcagccgtggtgctggtcaccacccccgctacccccaggagcttggtaggcttaagcacattctagccgagtggctattgagaatctgtgcggctccatggttgggaccctaggccctgttggtgtgggctcacgagtaggatcttccgatccatgggttacacagttccgtggaaaaaacatgttttcccaggctgggtagcgtactcactcactgcctaccttggctgggggtgactcctctgccccgtgtggctctcaggtgggccgccttaccacactgctcttccttcctctctgcgggtcacaccagccacatagtcagttctgatgatggaacctgggtacctcggttgccggtgcaggattcacacagtgttatggttcttttcaatgggagcctctgatcgcgtctgcttctagtcagccatcttggccccacccgctatgatttcccttttttcttctgtctttcacatgtagtctgtatttaaaactgctagacattatcctttctctaagagtttgcaatctggttggaaaaacagtatttaaaatgttaataagtagtgtaagtcagtgtataattaagcactaaattatatggagtaaacttagtttgggaagaggaaaataaatgaggactagattgattaaggaagatactatgaagaagatgaaaattaaccttgactgtaatatatggacatggtatgaagagaagaagaggggcatttcaggtcaaagggacaacctgccctaaggcacaggaactggattggagcagtttgtcagggtactctgtgaagactgccttgtctgcctcagatagcacatggtggcagggtgtgaggcgtggacaggacagaattgagccatgttacagaaagccgtcagaacctggggaggagcttagcttagatttgatacagcagaaaactgcacctttggacgcgctagaagggaatgacgtaatgtggtcattgtaataaagaattggtctggcataatatccaaaacggagtgactgaggcaggaagtaagggaagccaggcaggaagcaaggagagtaaatgtagcaaaagtctgagctaggtgggagcagttggaaacgaacagaggtaactgatacaagagatctttctaaggaaaaattcataagacttgaagacagactgggattgcttggttaagtttacttcttaaatagcaggaactttcattttaattatactcaggatgtttgtgatataatgacaccctgatataataacaaaatacttcactcatctcctctactaatacataaaaattattttaataaaactctcttgattcccttcttcaatattcattcattcaacaaatatttactgagcctttactatgtaccccagactatgtactgatacagtgatggttcctgccttcatagagcttgcattctagttaagaagacaggaataagcaagaaaacaaaagaataaatattgttagattgtaatacgtgataagaacataaaataattagtatttatgataaattctccaagagaaacaaataagccctctggctaaaagaaaattatgggggccgggcatggtggctcacgcatgtaatcccagcactttgggaggccaaggtaagatcacttgaggccaggagttcaaaaccagcctaggcaacatagcaagaccccatttctacacaaagttttttaaaaatagtcacgtatggtgggacatgcctatagtcccagctacttgggaggctaaggcaggaggattgcttgagcccaggaatttgaggctgcagtgagctatgattgcctctccagcctgtgcaacagaacaagaccatgtctcttaaaaaaaaatgatgagcagtagggaaaccaacttgaaaagcttatcaggggaagccccgctaacatagtagcatttacgctgaaacaagaaactggaaggccagaagagctggggcatagactgagggggaagtgatgtgagatgcctgcaggggtaggtaggcagggtccaaatcatctagagccttgagcactatgggagggagttttgattttattctaaatgcaataaagaaccactggagggttttgcgtaggggagtgatatggtccttttatcatcagacaggcccagttccagcactggtcattccagcctcagtccgggtagcaataggagtagtcgataagaaggaccctttcttttctagaaaactaccattactttgttaattcttattttatgagctccttactcttctcaccctgctgccctttcctatgttagcaggtgcttatatcaattcatgtaagtttccttcccccgatgtaatctaaaaataattatcagctaacttgtctaagatattcagaccttcatcctacacatattcctcatttcagtggcctacataaaataaaggccttaaataaaataaagaggatttctgctacatttttatattctatagaattcaaactcaagagtttcagggcttgtatgagtatagaactgtcacataatcacagaagaatattggtgtggttctttgattttctatagagattaattcagtgaacaattttgtttaatgcatttgaaatttaaatttgggcatactctaatgtatccagagtttgttgttgctgttgttgttgttgttttgttgtttttgagacagagtctcgctctgttgcccaggcaggagtgcagtggcgcgatctcagctcactgcaatctctgcctcccaggttcacaccattctcctgcctcagcctcccgaatagctgggactacaggcgcccgctgccatgcccagctaattttttgtatttttagtagagacggggtttcaccatgttagccagattggtctcaatctcctgaccttgtgatctgcccgcctcggcctcccaaagtgctgggattacaggggtgagccacggtgcccagcctgtatccagagttttaatcctttcctcccagatgttgaggaaattatatctctaattcatatttagtgggggaaggcctttacataacagaaagaaagcaggaaagctatttctatcccatagtaaatttcttcttatattttaattttggtgctcttcagctccataatcccttagacttgaaactggaaaaatctttggcttcttccgctccctatccctctacatctagttttttgacaggtcctacatatttcttcactctttgctgtttcattggtgtctcccttgttcaggccttcatcacattttctgggactattatagtgagtagtagtcttcagggtatctccagtctgtcttccctctccagtgagccaagcctagtattaggtccacttcagtgggtcatcactgcctgtcactcaaaggaaatataaaccaagtactcagcctgacattcagactgtcctggcagaaatagccaattttatatatttatatattttttgatttttaaaatcattctgtaatagctacaacagttaaaatttgtaactacatatactttgttttcattttctaaaaatgtatacacagtaaaagtgggagagagatagccaggacatatatgcttgtgtgtttcaattgatgtagtttaattagttgttggatttggcagtagttatattcacccatgcatgacagaataatttgtgattgtgataaaatatttgcttattttgtctttgggtaaaataacaaccaattcattttgcagctttttaaaaaatagctaatattcctattgaaaaatttttttaaaaaaattataattaaagatataattaatcctatcataccttcactatttttgttttggagtattgttagcttccatctgcatatactgtaaattgtaatcataatatatattgttttttattctactgttttactaaattttatttcataaatacttccacatttccatgattctggaaagtattcctttctattttaatgtctgtgtaatttttggtagatacaccatagtttactaaatcacctttactaacaccatacatgctgcaaaaaatgtgagtgtgtgtatgtatgtatgtgttagtgtgtgtgtgtttgcacttttcttatgaatcatttccttagaataagttcccagaacaggattttaaggtcaaattggcatttgcaaaatgtcggttctctaaaagttggacacatttacagtgctaccagtaactgaagaaactaatattttttcaaaagatggttttgaatatgattacatgccaaaaaaccgtatttttttctaatggtagatatagtttgctttaatttgtatttatttggttatgtcaaagataaacatttttaaatgtttgctttctaaattgttttgtgaattatctgggtttttaaaatatgacattaaaactaaatcattgttttcaaatgtgtaatatatatctgctaagatgaaataattatctgtctttggtttaagaagatgttttatggttatttcaagaaatccatttaatgaaacttaaatggagcattttctgattaactgtcagaactgaatgaataaaattgaaaagatttcttatggtaaatttcaaactaattccggaaattatttttgaaactatgtatttttcaaaatctattgaaaaaataagaataatgatgggagactcacaattaactagtacataataacaactaaatcagcgtaacactgatgcagtagtagacttacagataagtggaacaaactagataacttaaaaacaaacccaatatgaataagataaagtaagcattacaaattggtgataatttaaattgtcactggtaaaatttgttaaccctttgggggaaaaaaaaaagttagatccctactctataccagactcaaaaaagcactagaaaaaaaatgttaatgtttttatactcttggattaagagggaactttcaaagaacaacactaaaggcagaacccataaagaaaaagactgacaagtttggcgacataaactgtttcaactttcacaaattaaaatagaaggaagaggccaggtttggtggctcacacagtaatcccagcactttgggaggccaaggcaggtggatcacttaaggtcaggagttcgagaccagcctggccaacatggtgaaaccctatctctactaaaaatacaaaaattagcctggtgtcgttgcacacgcctgtagtcccagctactcaggaggctgaggcaggagaatcacttgaacctgggaggcagagattgcagtgagccaagattgcgccactgcactccagccaggggcgacaaagcaggattccatctcaaaaaaagaaaaatattatttctaaaaggaagaaagaaaaattttaaaggcaaagaactgagaaaattatttgcaaaaagtaactatgaaaggcaaaagattaatgtcctcagggttaaaaatgttctcacaaattcagtaagacaaacgcaggcattccaatagaaatgtgagtaaaagccatgaacaggcaattcacaaaagaattcagatagccaatacacatgtttttaaaaaatcacctttcacacacataaattacttttcatactcaaaatatacattaaacacaatgagatgccattcttaactagattaacaaagataaagaataataatactaccccgtgatgatgagactgagagggatatggtcattttcacgcaaccaggataatctttctggagagcaatttggtaaggtgtatcaaaaacacaacccattgacccagaaatttcacttctagcattttgtttcaagaaaaataaggcaggtgtgccaaggtgaatatacagtgatgtgtattgtaccactgcttgtagtaccgcttttcgtgagaggaactagagcatagtagataagattcagattggtaaaagaccttaggcaaataacttaatctctttttgcctctgttttatctataaaatgaaagtagtaataactatcatcagactgttgtgccagttagcatgcttagaaatagtttctggcatatagtaaaggctatttcattgttagctgtgattataacagtggaaaaccaaaataatctaaacatacaacaataagatattggttaaataacttatgatttagttatataatggaagagtctacacatattaaaaatgataatatagatttatgttttatcatgtagagagatgttcacattacattgctaggtgaaaaaagtaaatgatgaaacagtatatatagtatgatcccatttttgtttttaaaataagtatatatggtacaggcaaaactcagaatacatgctaatagcatttctctctagctaatggaaacacagttactattttatctactatccctcagttttctatagtgaaaatatattgaataagaatatagtaaaagccaaatagaggaaacagttgggcagtttctcagaaaagtgaacctaagagtttccatatgaatcagacatttcactcctagatatatagccaagaggattgaaaacatatgttcacataaaagttgtacatgaatgttcatagcagcattaatcagccaaaaagtggaagcagcccaaatgtttattaactgataaacaaaatatggtatatccatacaatggaatattattcagcaataaagtaatgaataatattaagccaagtaaaagaagtcagaagtaaaaggccacatactctatgattctgtttatatgaaatgtccagaataggcaaacctttacaggcaaagtagattactgattgccagggactgggaggagtgaggattgggaatgacagctaatagatacaggatttctttgggggtgatgaaggtattcgggaatagatagcggtgatggttgcagaacttagtgaatatactaaaaaccactgaattgtatattttaaaagagtgaattttatggtttgtgaattacatcagtaaaatagtgtttaagtaaaatagaatctattagctatgagacactagattttaaaaggatttttggcaaactaaagtttatttttcatcaaattctaataattataggtatggattttaaaagagtagtttttttgttctaccaaaaagacatatgcatgcgtatgttcattaaaatactagtgacagtaacaaagacatggaatctccctaggtgcccatcagtggtggataggataaagaaaatgtggtgcatatgcaccatggaatactatatagccataaaaaagaatggaatcatgtcctttgcaggatcatggatgcagctaaaggtcattatcctaagtgaattaacacaggaaggaacaaaaaaccaaattctacatgtcctcacttataagtgggagctaaacaatgagtactcatggctcattgacgtaaagatggtaacagtagacactggggactgctagaagggggaagaagatggggcaagggtcaaaaaactattaggtactatgcttagtacctgagggacagaatcattcataccccaaacctcagcatcacacactatacccagataacaaatctgtacgtgtgccctcttgaatctaaaataaaagttgaaattattaataaatacaagagtaaattttgttacagaaatgtgaatcagggaattataagtgaccctgtagctttatctccacagcttcccctaaccccccacaaccccactttagttaatgaaaactttgggcattttgtttctgttgtcagaatttggctttatattttaaattatttgcactacttttggaaattttagccttttttaaatgctcagttattctagtggctttcaggcagttttaaatgagagtgcacacatgtatgtgtgcgtgtgtctgtgttttctcaagtaagccaccatctctgtatcccaccttgtggtgtgtaagtggttcaagtatgttctagagtaacgtatgaagtataaattatctcattttcccctttgtgatttctctttctcctctttccatctctttcccactcctggcctttcttgtgctccaaaatatttgaaaaatggagttagagtgtaataccttatttttaattaattctttccttaagcattttttgagcacctagtatatatcaaggcactgtgctaaggttaaagaaacaaaaatgaaatacctggtttcagacagataaagtgatacgtcttagagctgctctgggaacagttcaggaagccgtttaacccagatatggaccatcaggcaggacttccttttaccatcaatataattagtagatcttcttttaaagcacgtcacatcaattctgcatttttagaaaactgttgacagtatagtttattcttggcccttagcacaccccataattatataagcacagaaaaaaatcttgagaaaaactgtgtggatctatccccaagagagatgtataagccaaaaattattttttaattggcatcaatagtaagcagtacaggcacagagacactgggtgaaggcctgctttctgctcgactgcttagaatgtttaagatcttttaaaccatcagagcttttaatggccttgcttcccctaataataatacctactagattttaaaaaatactagcatgaacttaaaggaattactattctcattggtgtttttaaagaaacaaacaagcctctctatactgctttcttcaggactgattttcaactgatacgtactggtatagccatattggttgtgaaatattgaaatatgttactggttagtaaagagctgctacggtaagctgtctagatgccccgccacagcctggcctttccaacaggaacttcactcctgcacctctccacaatccaacaattaaaaggttatcccgtggcgtagcaggaggcctttaggtcccttcttcactaggcttgcatccgtagtgattgctggtgcttgggccatcccttccctgtaataattttgaatatcatcccgactttcggactgatcaagtaaatcattaatgttttatcagtgtttgtgttctgcaatttacagtatcaattagctctagctcgcctgtgttgcttatctgtatagaatcaacattcgcagttgcattatttctgaataagcctaggatgccatcatatgataactcaagtccctaaaccacactgcattttttctctctttgtttctctcaatgttgacagtttgacctaagttctgcattctcttgttcctttcagttcgctttgcaccttataggcctccagatatctccttgaagcctctgctctttgaagtgcccagcatcactacagagtcagtgtttgttggccgagattgggttttccacgaaatagatgctcaacttcaaagttcaaatgccagcgtgaaccaaggagtagtgattgtgggaaacattggattcggcaaaactgccatcatctccagactggtggccctcagctgccatggtacaaggatgagacagatcgcctcagacagcccacatgcctcccccaaacgtacgtattcctttttaaagaactccctgtttcattggcgctgaagtttttctgacatatttatattaggtcgtatatccttttattttctcatctgcaaaacctgacttccacgtgaggactattcatttaggttgagagaaagattgtaatactctatttacatctaacccacatacccagtagtcacctaagcgtgactgaagaaaaacctttctcgtggaataagtttatgactcctccgtgccggctgtgtggttggactgtcctctagataacgaccgcagcaattgcccgtagagcaatttgcattcatcactgttggattttgctcagtctgtgcccagttcttcttcttatttgccagcacagtctgtttgcatccttcatctctttgctgttggcgtcagtgttgcactgcttggacttgagcttcgttgtgtccttgaaggggttctctcctgcttccttgtgaaaaggtgctgagctctcatatgtattcaggcttctttcatcacaaccagggggcagcccagtaatcactaccaggatcttactgatttatttttaaaacactcatatggtacttactatgtgccagatactctcttaacttttttacaaatattaattcatcacatcctgttaccagctcaatgaggttgtcttcatttcacaggtaagtaatctgaggcccagagaggttaagtaagttctgctaggttttacagccaataaatgggagaactaagcagtctggtttcagaggccattctcctatccattttactatgctgcctctccttactggtgaaactcacttgagtaaagaaaataaatagaaatgtatcagtattcttcttatacatactacatgtatagaaccagtttacctggtttctgttagttagaagagaacaaaaaaagaaactattgctttgttagtccaaatcaataatctagcccaccacagactttcagactgcaaccactagaaatggtttgtgtgagataatagtagttacagggtctagcacagtgctggaaacttaacaggaactcagtgaagaccctccaaacttattgacttcctattgaagctagttagcagccttgtatcattaaggaggcagatggcctctgataaacttatggatgtctaacgtggaagaactggtgtcttggaagaaaactgaatcaaaatacctctttaccagggtatggtaagaattggtatggaagaattcttttcttcagaggaatataatgcttagtttctaaatgaagctcttctgaggtagattgccatagtactgtgggagtcaggagcccagggtttgtgccccaacactcaaattgactagactttgtgaacttgagaattttacttgaattttttagagctcagttttcttatttgtaaaatgaagaagtgtgactaattgatctttcagaattgtctctgctaaaattttgattctgagaacacatcttcatggttaaaagtaactttccacactattccagtgttttcctttgagtgtttaagtatttatcactccaaactgctgtttatctgagtagttcaagtggcttgcaatttgagtgtgtcagaaaggaagccagaaagctcaagctctctgtgactcctctgtatatcagagttgcagataacagagtggtagaatcatgcatgacagaaaataaatcccaaggacgagaagagttgctttcacagaaagcagaggtacctggggatctctctatgagcctgggggagcaaaagtttatagaaaacagcccatgtactccccaaagcagagattctttaaaggtagttcactaagttattctctaacatccattgccttcaggagaatctccagaaacaccaagacactccccattcatgagataaacatccgttgttgagactgtagatttggtctgacagttaactttccgaatttgaaaggagttaagagagctaaatatgcggttctatatatcagaattactcagaaccaatgttaccttatacaaaataatttttgttacaatttattgatggccaaactatattctaccagtgccatcttaaccaatagaagggtcaagaataagtgactgatataatgcaagctattttttggcacaaatctgttacctatatgaactggtgttgaatatgttactggcaggagcagcagttttttcactaatagtaagaatgatgtctgtatatggagggttggcttaattttttacagaatataagttattaatataagttattatattaaacttaatataagttattatatataaacttaatatgagttatcatattaagcttggatgggtcatttggaacctcactggctttcttaatccttgggtgatgatactaattaatagttgtagtgataataaaaaaacatgggaaatcactggagttcccaacttctttctctgcatcatctgtcattctttcttctgcccctgtcttctttctgtttggtgttcagagaatagtagaaataaaagctgagcaccactgctgtggaagataggagcagtttagcctgcagtactgccttgcttggctgtccttcccccacagaaactcagccccccagcccgcccccctccttgtcatttccctggaaaggtatagaaaagctgtcaaggcaggcactagcctgtcatcctgctttccacctactctcccaaacctgacacccccatcagtctccaccaccaccaccaccattatccacacccccaacacacacacacacaaagaacaaaaatattttgtgaaaacagacctgttgtataattcaggattattacattaactacaggtattctcagtatagtagttggggaagctctaatacaagactgtatgtttctatcactaaaagtctcaatgtagttattatttggatttgacatttgccaacagctgccaagcccccaaacagctgttaagtaaataaatcctacgttcctactctgttcatttcagaagtctcttttgccagtgtgctatgcacattgactattgcctacctattaacttttatttctactattgtctgaataccaaacagaaagtaaggtgtttagacaaaaaggagggcatttccaaaaggaaatagctagaaagacagagggcatttggacagtaattacccacaaaatcaaataccagataaaggggaatagagtaggggaaggaagtgaacagcagaaataatgcagaaataatacagtaacatacaatcactgaacttcacctcaacccaaatgtcacacagtccttgaggcttctttcactgccatcctccatgcccacccccctgcagttatccagaactgtatccagtgaccaagaaatttactgcaccagttaaatgaaagaagtctaaattcactcctactggtaaggagttaaatgaggactactttttcctattcttccttcttttcaatcactattggccatcaaataacaacttctaatatttactttggtatctatttttaaagtatgatcttattcataaatatagcctataatttctactagtaacaataaatgttctaaataagaacaaattgaatttttaaaaaaatcttaaaacagttttattgagctgtaactcacatactatgtaattcacccatttaaagcgttcaactcagtatttttagtataattcacagagttgtatagcaatcaccataatgtaactttaggccattttcatccccttaaaagaagctcatgcctgttagcagtcaatccccattctcctcttaaccctctatttccagccctaggtaaccactaatttactttctgtctctacagatgtttctgttctgggcatttcacataaatagaatcatacaatatatggtccttttttttactgacctcttggatttagcataacattttcaagggtttatccccgttctagcatgtatcggtatctcatttctttttattgttagtagtctattgaatggatattttgtatttcatctattcatcagttggtgggcatttaggttgtttccacttttggctattatgaatcgttcttctgtgaacacttgtgtacaagtttttgggtggacatgtgtttttatttctcttaagtatatacttaggagcagaattgttagatcatagaacaaatggaatttagccatttttccttaaagtttttatgattatctgatgcaaacatctaaatctttttaatccagatgtggatgccaacagagagctgccactcacacagccaccttcagcccactcatctatcaccagtggaagctgcccaggaactccggaaatgcgcaggcggcaggaggaggctatgcgaagactagcctcgcaggtacaatatgattcccacgttggggatatggtagttccattttaatatcaaggaagcaaagatagggagacctttggcaaagtgaacaaaaatacgtaaagctataccatgagaacgtggaggaaagtttctctttctttgatattcctagaaaaatactttattgtgatgggatcagaaccttagagttggaaagacccttagaaaaaacgtcttctagtgaataaataaagaagttgagaccgaagtgggttagttggttggtttgttttgagacggagtttctctcggtttcctgggctagagtgcagtggtgcaatctcagctcactgcagcctccacttcccaggttcaagtgattcttgttcctcagcttcctgagtagctgtagctgggactacaggtgcgtgccaccacaccagactaatttttgtatttttagtagagacggggttttgccatgttggccgggcttctctcaaaccccttatctcaggtgatccacccgcctcagcctcccagagtgctgggattacaggcgtgagccactgcacccaaccggaagtggtatgttttacccaacatcagggtataagtaatcaacagttttaaattttcattcctagcttaaaactcttcgtgctatactaccctgtccataatattttttatacatttgagtttgaaatttctatttttttcaaaataacataaacacatagaaaatcaaagaatgctcaaaaccagcagtgctcttcctctaccccacccatcttctctccacaggcagccacttttacctcttaaggaagtttctctgattttcacctccatatttctaaatactattcgtatactgctaaaatttttattagtttacaaattatctattgcttcttattatggatgatgggaattatagttgtttcaccttccttcttcctaccaccatcccaatacaattattgcatgatttttggctgaatccatattatatatagtattttcagtattaatactgtgcaaatacatcactctggcgccaaggataacatttccttcttgaacgattttgtttttcctaggggtttatgaaatgcctcattttaaaatttgcttatttttcttcaaatctttggctaagtcatttcataacccttaatgtagttttgtaaaatttctgtcagtacagttttccacacttacaagttacattttttaccctggaggcctccgtcctagagccctccatcgagctcagtctggacctaggacactctgaaggcttaccaccttgttctcctgggagttcctgtccctcctcttttgtgtttcatctcatgtcatattctttctcgattttattcttcattttggtggagcatatcttccagtagcttcctaacaaaaaatgcataggacataaattttttgatacttactgtttctaaaagcatcattattctatgcttatacttgcttatttgtttgacacagtatatcattctagggtaaaaattattttttctcaattttgaaggcattgctccattgtcttgagcttccaatattgctactaaatactctgatactattcttattcctaatcctttatatataccttgttttctctccaaatgcttttagaatcctttttatcaccattgttcttgagtctttttcatttattctgttggtacctagcaagccctggaaatattctttaattctgagtaatgcttttgtattatgtatgatgatttcctcaccaccatttcctctattttctctttctacaactcgtattaataaaaaattagatttctggctgggcgcagtggctcatgcctataatcccagcactttgggaagccaaggtgggtggatcatctgaggtcaggagtttgagaccagcctgaccaacatggcaaagccccatctccaaaaaaatacaaaaattagccaggtgtggtagcatgtgcctgtagtcccagctactcaggaagctgaggtaggagaatcccttgaacccaggaggtggaggttgcagctagccaagattgcgccactgcactttagcctgggcaacagagtgagactccatctcaaaaaaaaaaaaattaaatttcctatactggtatgatactctcattttcttaacttttctgttttctatacttttgttttttggttttttaatccacctttgagagatttcttcaacattactttccaatccttttacaaaaaatttatttttgctctcatagttttaatgtgtaacagttcttccttttctccagctgtctccttctttttatagcatcctgttcttgttttatggacgcaatgtattctttacttaggcactgaaaaaactgattagaagcttgtgtgtgtagagagcttgaccatagaacattaagatgatccgccctttttttgaaatgcccaaaagtcagtattcctaagtttttttcctgggctgttcaaattctctagcaaagaatcctccagtcttctgactggagagtatatgtcttgggtgccagcattttggagctgggcaggaaaagagggctggagcttcactgttcactatcagacatttatttaagccccttgttttcagtcctgcacctgatctctaccttgctcaatgtgtggtgtccctaagtctagattctctcttgtttaatttctctagttctctttcctgtgggtgttggggaaggtagtcacctggctgggcagggcagggatgggaatctggggatctaacttcttacataaacttcatataaattctgtgttttcaggtcccttcacccttctcttccacagtacctggtgtttctaattcctatgctttgtggaagttttacagatggtctgtaatattgtaaggttcaaatttttcatagaaatacactccagctccaagccagaaacagcatgttttcccagatacattattaattattcctactcagtagtacatcctcatctataaatgggcttctgcaaaatctgagatttccgtcaattcattgcgaagtcattgtagctttaaaagacatctctgtttttttctaaatatctcctgtgtaaacggtctctatcctcttctttagaacagttagaatccctgtaatcccagcactttgggaggccgaggcgggcggaccacaaggtcaggagatcgagaccatcctggctaacatggtgaagccccgtctctactaaaaatacaaaaaattagccgggcgtggtggcgggcgcctgtagtcccagctactcgggaggctgaggcaggagaatggcgtgaacctgggaggtggagcttgcagtgagctgagatcgcaccactgcactccagcctgggcgacagagcaagactacgtctcaaaaaaaaagaacagactaatatctatcttagaaatacacagatgttaaagtgcttccagcacttcagttattcagtcattcagttattcagtttagatatacatttgaaggacctatagtccaggactgaagataaatcagtgaacaaaacagacacaattcctgctgttatacagtccacattctcatgagagaaagacaataaacaaatacatatatagtatgtcagaagatgataagtgctaagatcacagagaattaattctcctcactttcttacatcttattctttctctcatcaagagaagtcccaagatgttcatgttcaatatttggaaaacattacatgtcataagtaggaaattagtggctactgtttatacttatttgaggcatgattacatgttaaatttcatgattgtgtcttccttaagcaaaatataaattaatctagttgcacctagacatggaatcctgttcagcttataacattgtatcagaagtagccacttagcttaaaactgaatgttatcccagttattgtgctacgtgttacagttcagctacacaaaagtgttctgtagacgcatagagcagaagcctgcaatcttgctgctcacctatagcaaaccagtaagcagaaattatcttttaaataggattttcaaattagttaatgttttgatgaggtagactaacatgaaaatttaaagtgttcttgaaaaatctctcaatttgacatattcttggtgtcatttctttgtatgtcagtaattatcattggtatttcataacattcttgctctttcttgtgcatctagttaactgagaacactggagagtttttgtcacaactttagaactatttcatttattgaagaaatactttccatttgaagcaaagattttgataggttggcatctctcgagcgtgtctccacttaacattacatatttcttctaaagcataatcacagtagagggacagggagatctcattcagggcctttcctggatatgtgaatttaactccaacagagatttctctaggttttgaatctgttgtgcccctgtggtaatacacacaaaattcacgagacaaggagaagttggcctccctttatggaaggcttaatgtgtgttatgggcttagtgctatttaccttatatttgctatatcatttcttcatttttaccttaaccctatgaggtacatcattatctcattttacagatgaagaaacagtgacttcagtgattaattttttcaaagtcatactgttaataaataacgaagtgaggattcagagtcagtatcctcccctgtaatgtgaatactatggttatccccattttacaaatgaggaaatagaggctctgaggttaaataacttgcttgagaccataagctagtacatgactgagtcaagatttaaactgaggcaggcaaagtctatactcttaaccactgcacgaagctgcttctctagtgtgacaggaaggaatttagtttagtgttatttcgaaaaatccatccatcatttaaggtggcttcacagcaagaaaattataatgaagatgtactttcagtcattttgctgacctaaaattcttcttcaaaaaaggtttttatgcaactagaatctcccaacacattaagcaagttgtcactgacagtccttagattaagaagctaacatatctgaaatgagttcattagagaaaacagctaattttaggaagtgtcacagagatacaaaaagcaaaggttttttttcccaaggaaatctatgtaagaaaaaaagtaaatgtcatccttgccaagagacaagttctgtactataccagggggtgtcaaatgatcatggttcctgaaattgttgcagtcactattaaagctgtcagccaaagaagtagtcatttcagtaatcctttaatattgagcattttgaacataatatggaaatgtaagccagaaacatgcacacacacacacatacatacacagaaaatgaaaaacaataatgaagaataagattttatttgtgttgtagtgattatttttaaaaatattttcatttagtagaaatgagatccaaactaaacaacacataccccatagatgatgttttataaaatttgtctagggcttttcttctctaaaaattaacactgacgttttactgtcagacccagatttcatctacatttggaacactgaatatgggaaaacagccttgttgtttattgttaatttctatgttgtttttattttctacctcttccactagaatgggtcagtgtttaaatgttcaccaccatatccccagctcctacacaatgcatggcacataaatatttgaatgaagaaattctagtcaattctctgtactgagtaatctttctaaaacatttgttttttgctacttaaagccatcaaatagctcctccttgcccttgaatgaaatccaaactcccttcttaaaatatcataaaaattgtaatgaaaggacctctgcttttcccaggaccggttattttagactacataattctttgtgtggggtggggggcggggggcgggcaggggcaaggcggatgttgtcctgtctactataggatatttagaagaagtgaccttgacctctgtgctaccagtagcactccctcaacctctaattaagacaaccagaaacgtctccagaaattgccaaatgtttcctggggagcaaaaccactgccagtggaaaacctcgccatgccctatcttccaccattccccactcacttatatgctagccacactaaaattgatttcagttccttgaaagtaaaaagctatgtcttgccttagggcctttgcatacttttttcccctgcctggaaaactaccacaccttggttcaccccttgtccttcttcatgtctcagcttaaatattgcttcttctaaaaaagctttctctggctctcctaaattaccttaaggtgccccagctgtgtgttgccctagcaccctatgtttcctctcttctatcacactattattattacttgtttaattgcctctgtttcctgctaaactgtggagggcagacaggggtcatagctatattactcattattatagctttaaaacctagcacagtgcctgatatacaatggaagttcaattaatatttgtgaatgaatgaaaatgttagtgttttctattaggaaatcttggagtattcagctgggtacttatacatgatagtggttcccaaccaatttataaggtcaattcagaatcagattcatgtgttccgggaatgaatcttgtttgagaatctggaattccaccaatcctctaagacaaagtttcataaactgtagattgaatgtacttagactgtttatgtgtgccagatcagcatctctaggaattccagatgaactaaataaattagccgcttttctttaaaatttgtatttgttatcggccctaacctcctttggctcaagtaatcagtaatgtataattgaatagtagcaatatacaggatacagctgtttagatctagaattataacaaagataaacattatcctgatctcagctacagctaattaaacaacagggctctgactacgagccattgaggcatactgtaaagcctaaatcaaaacggtgtgtttctagtatgtgaatagacaagtggaatagaataaaaagttcagaattagacccaaggacatgtggacacttagtgtatgatgaaggcagtatttcagatcattgggataaaggtggactttttaattaaatgggctgagacaactaaataaccatatagataactcatatctcacaccatgcacaagaataagcaaatggattaaggatctaaatatttaaaaatgaaaccatgcaactaatggaagaaaacttagtaactttctctttaaccttggtgaagagaaaggctttctaggatctaaagctagaggaatagaagaaaagattgacaaatttggccacgtgaaaaaattttaccagcctgggcaacatagtgagaccctgtttctatgaagaaaaaaaaaattagctgagcgtaatgacaagtgcttatagtcccagctactcagggtgctgaggtggaaggattgcttgagcccaagaggtatgggctgcagtgagccacaatcatgccactgcactccagcctgggtgatagagtgagactgtcaaaaacaacaacaacaacaacaaaaaaaaaacttctaatgttgcatgaccaaaaaataccagaaacaaagtcaaaagacaactgataaactgagagaaaatattgacaaaagagctcaaaagtacaggcaacaaaaggaaaaatagacaaatggaatgacatgtaaactaaaaaccttttgcacagcaaaggaaacagttaacaaagtgaggagacaattcacagaaggggagaaaatctttgaaaaccatacatctgataaggagttaatatctaaaatataaaaggaactcagacaattcaatggcaaaaaacaacctgattaaaaaaatgggcaaaggacctgaacagacatttctcaaaagaaggcatacatgtggccagcaggtacatgaaaaaatgctcagcataactaatcattaaggaaatgcaaattaaaaccacattgagatatcatctcacaccaattagaatggcttttgccaaaaagacgaaagataagtgttggcaaggatgtggagaaaagggcactctttacgttgttggtgggaatgtaaattagtacagccattatggaaaacagcatggaggttcctcaaaaaactaaaaatagagctatcatatgatccagtaatcctgcttccaagtatatatgcaaagaaactgaaatcaatgtcaaagggatagccacacgcccatgttcattgcagcatcatttgcagtagccaagatatggaaccaagctgaatggattctttaagtgtgttatttttttaaaaaagcagtttggaaatttctcaaagaacttaaaacagagttactgttgaacccaacaatcccattactgggtatatacccaaagaaatataaattgttctatatataaatataaagacatgtgtccatgtgttcatcgcagcacttttcacaatagcaaagccatggaatcaacctagatgcctatcagtggtggcctggataaagaaaatgtggtacatatacaccatggaatactgtgcagccattaaaaaaaaagaatgaaatcattcatggttttttttattatactttaagttttagggtacatgtgcacaatgtgcaggttagttacatatgtatacatgtgccatgctggtgtgctgcacccattaactcatcatttagcattaggtataactgctaatgctatccctccccactccccccacctcacaacagtctccagagtgtgatgttccccttcctgtgtccatgtgttctcattgttcaattcccacctatgagtgagaacatgcggtgtttggtttttacagcaacatggatgcagccggaggccatcatgcttagcaaattgatacaggaacagaataccaaatactgcatgttcttgctaataaatgggagctaaacattgagtacacatggacacaagaaagagaataacagacactggggctcacttgagggtggaaagtaggaggaaggtgaggatactacctgtcgggtactatgctcactgtgggtgacagtcatctgtacaccaaaccccaagcaatttacccattaacaaacctgcccatgtactttctgaacctaaaataaaagttggaagaaaaacagaattttaaaacatggtatgtgtatgtgtatatgtgtgtgtgtgtgtgtgtgtgtgtgtgtgtattcattgtgtgtgtgtgtttgtataatagaatactacttagcctttaaaaagaaggaaatcctgtcttttgcaagaatagggataaaactgaaggacattatgctaagttaaataagccagaaacagaaagacaaatactgcatgatctttcttatatgtggaatctaaaaaagttaaactcatagaagtaaacagtagaaagatagttaccagagactgggagtgtgaagaaggaaggaatgggagaagttgttgatcacaggtgatcaacaacttctcccttgtacaaattttcagatagataggaagaataagttttaagatctgttacaaagcagggcaactacaataatatatttcaaaataactaacttttaagtgtttcaccataaaaaatgatacaatagggaggtgatacatgtcaattagcttggtttcatcattccacattatatacatatatcaaaacatcacattgtaccccataaatgtatgcaattatgattagtcaatcaaacataataatttaaaaatctaccacttgtcaacttttagcatagtatcaaagaaaaacatccaccttcccttctccaacatatgactggcatttcgtcttgtacttgaatccaaaacagtttcttggagcatactgaatgcagaggcagatttgggagtctattgcaaaaatttacacagtgccactttctgaaatgtttgctttgaaaaatagttattttcataaaacatattcttagatgtcagcatgatagatttattatttttttaatgaatcaataaaaattttaagaaaaattatagcatatactacagataaagagttaatatctcttatatttaaagaactctttaaaattgaggaaaagaccaaaacatgatgaaaaaatgggaaaaaaataaacagacaactcacaaaaaagattaaaatggccttgaaacattttgaaacatgttcaaactcataactaaagaaatgcaaactaaatcaatactgagataccagttttttacctatcaactagcaaaaattttaaaacatgacaatttaaaaactattctgttgtcaaggctgtgggaaaacagacactctcatactggagcacgcctgtcaacaccatttttctgagagcatgtgtttgcttcatgtctccatgtcacatttggtaatgcttgcaatatttcaaactttttaattattactatatttgttatggtaatctgcgatcagtagtctttgatgttaccattgtaattggtttcagataccatgaagacagcaaatttaataaatgttttatgtgttccgatgactctactgaccagccattcccccatctctgtctccttgggcctccctattctctgagacacaatattgaaattaggccaatgaataacatcataatggcctccaagtgttcaagtaaaaagaagaactgcacatctctcacattaaatcaaaagctagaaacaattaaatttagtgaggaaggcatgtcaaaaacccaaaataggctgaaagctaggcctcttgcaccaagcaagtaatcaagttttgagtataagggaaaagttcttgaaggaaattaaaagtgctgctttagtgaacacatgaacagtaagaaagcaaaacaagctttttgctgatacagagaaaattttagtggtctagttagaaaatcaaaccagccacaaaattttctataagccaaagcctaatccagagtaaggccctaactctcttcaattctatgaaggctgagagaggtgaggaagcttcagaaaaagagtttgaaggtaacagaggttgattcatgaggtttaaggaaagaagccatctccataacataaaagtgcaaggtgaagcagtacgtgctgatacacgagctgtagcaagttatccagaagatccagctaagataattgatgaaagtggctacacttaaaccatagattttccttttttttcattgttttactttacatctttattacatattttctgagactttattttaaaaaaaaaatttattcaggatcataatttgcatgacaataaacaatggtttcgtgggttccaaattcttaaaggtgaccataccaatttaaaatacaagtcatctttttgatttgcagcacctgacttaaaatataattcatctaatgcattcattaaaagtgtccgttcttttataagaaagatatgttttaattgctgttttccagactgttaaacatgggtatatattatttttaattggttagcagaattttactcacataatttatagccacaacaagagcctctagcctctctgaatggacttccactgagaacaatgatgataataaatatctaaaatgtaggcggagcgcggtggctcctgcctgtaatcctagcactttgagaggccgaggtgggtggataacctgaggtcaggagttcgagaccagcctggtcaacatggtgaaaccccatctctactaaaaatacaaaaattagccaggcatgatggcgcatgcctgtaatcccagctacttgggaggctgaggcaggagaattgcttgaacccgggaggcagaggttgcagtgagccgagatgacaccattgcactccagcctgggcaacaagagtgaaactccatcccaaaaaataataatgtatctggggtgtgcccctacttgacattgccaagtgtgtttccaaatattcttagaaaatatggtttttaaacacatgcataatattctaccacatgatgcattatcacttctttaaccatttatttcctaattgtttatattatttgcaactttttgatatataaataacattgtgatccataccttcattcataagttttatgcaagactgattatttctttagaatgatgtcaaagaagtggcttactagtataaacagtgcaaatggtctaaaggcttttagtgtactttaccaaataatttccagaatagcttgaacaaatcccaccaacagtatgttattgtgcccacgaagtggacttgataacagtgaagcaaattcaaccacaaatctattagattctcatccatctctaaactgtcatgtcaaagaagcaaggtattcttcttcgtattactggtgaggaagccaaattggaatgctttttaaaaatcactcagcattagatcagtaaaataatcaacagaaatgcttcccacaaaaagatctgggtttttcaaaaagaattaagaagagagggaaaagtcagtagcaaatgaccagaattttttgtctaaattctatttcatacgtagacaatctctcctatttatttgactttggcaataaaaaaccaaacaaccttgtacagaacagtgaaaacgccaagaatgaagcctacagttttactgtaagataagagtgtgtgtgtgtgtgtgtgtctgtgtgtgtgtgtgtgtgtgtgtgtgtgtgtgtgtatttatttatatttaaaagacttctctccatttggcggtatcaactctcagttccagccgttaaatacagacgtattttcaaaactacatatttacttcttcaagatcttcgatgctgtcatcatccacctctggctgttttttctgaatgatatcaattatgccatctgtagagtcttcctgaataatttcatcctcccctgttaccgaggtaccacaggagaatttttgagcagaaaaatctttgtgcttctttaagatcaacttcaaaagttgcaaagccacacactgtttttacatatttcttctttgctctgggaattttggctataataaccttttatggtacagtctccttttttggttttatttgaccccttccacctctcttctgttttttcttctccccttcccctgctattccttgacccttactaattccacttcttgattgggtgaattttctacagtaagtttttcaaattcatttcatttagcaacaacaggcatatattcacagtaccctgttggtaatgaacagactctgcaataaaggactcaaagtgagtaatcagcatctaacttggcactgttccttgggcctcctttgcaatcagccccactggatttagaaatgccagcagccatttcacaaacccaggtggtcacacaggccccgctgcctctacttctaccactatggccagttgaagtgacatacagcttgtcttccctggccagggccacccgagagcaatgatagattcttaatgtagacagaatagccttctgtgggtagctggtgccacctaggactttcatagctagagagaagtcaatgcctgccttgagagcctcaaaagacaggctgacactcttgttagggactaatgtagctggtgactttcagttaaagccaatgttcatttaccattccaaaaattctagggcccttaagaatgatgctaaatctactctacctgtgctctgtaaatgaagcaacaaaacctggatgatagcacatctgtttacagcatggtttactgattattttaagcccactattgagatctacacagaaaaaaagataactttcaaaatactactcctcatggacaatacatctagtcacctaagagctctgatggtgacatacaaggagattattattgttgtcatgtctgctaacacaacattctttaggccttggatcaaggagtaattttgacttttaagtcttgtaacttaagaaatacttttcatgaggctagaactcccatagataatgattgttctgatggatctgggcaaagtaaattgaaaaggattttcaagattttcatctggaaaagattcaccattctagatgccattaagaacatctatgattcataggaggtcaatattaacattactaggagtttggaagaaattaattttaaccataatggatgaccttgagagaggttcaagacttcagtggaggaagtaactgcagatatggcagaaataataagaggactagaattgtaagtggagcctgaagatgtgactgaattgctatcatctcttgataaaacttgaatggatgtggggttgcttcctatggaagagcaaagaaaatggtttcttaagatggaatctgtacttggtaaagatgctgtgagcattgtaaaaataacaataagggatttagaatattacatatacttcgttgataaagtagtgccagggtttgagaggattaactccagctttgaaagaagttctcctatgggtaaaatcctatcaaagagtatcacatactacagagaaatctttcatgaaaggaagagccaattaatgcagcaaactttattgtcttattttaagcagttgccacagtcacccatccttcagcaatcaccaccctaatcagtcagcagccatcaacatcgagggaagacccccctacacaagcaaaaagaggattcactggaggctcatgtgatcattagcatttttaacaataaagtatttttaaattagggtatgtacatgtttttagacataatgctattgcacacttaatagattatagtgtaaacataacttttatatgcacagggaaatcaaaaaaattgagtgactcaccttattgctctgtttgttttattttggtgacctggaacaaaacccacagtatctccaaggtatgcctttatacgtacttgtatttcttagctctgttcagtgagaacccaaaaacaatgacacatcaatacaataatcacaactggtgtccacatcttttttcttaatatcattctccaataaaaagaacagaggctttttagagaagtagatgatcccagaggcagggaaaatacaaaataagtctagaacatcttttggtgccaaaaagcaagaacttgctcaaaaaaagatagaggcttcttgaaataacacagcagtcaacctgaaggaaatcctagtgactaaagctggaacaaattgagcaacaaaattaatatagtattgaattataaccaataggataaaataagcccatacttattaaatcaataataaataaataaatgggagataagggagaactctttcttccaataggattctaattaataaatgtagaaagaaacaaagaggggaatagaaaatcactattaggcaaacactcaggaaatactgctgcagacaagatccactgatagatactaaaattaatgggcaaaagtttaaggagaaacaggatttgcatagcctcaaacatctcccttaagatatttattaactacaaagggaaagatgatagtagaagaacctagcagaaccttaacaaagtgatcaagggcaacattaccagttgtgttaggccattcttgcattgctataaagaaatgagactgggtaatttctaaagaaaagaggtttgattgaatagtcctgcaggctgtatgagcatggcatgtgtccagcttctgaggaggccttggggagctttcattcatggtggaaggtgagatgctagcaggcacatcacatggccagagcagagcaggaggtgggttggggaggtgctacacacttttaaatgaccagatcttgtgagaactcactcactgtggtgaggacagcaccaagccttgagggatctgcccccatgacccaaacacctccctccaggctgcatctccaacattgggaattacatttcagtctgagatttgggcagggacaaatatccaaactctaccaccagtagaaaaacatcactatcatgaaccctgtgatatgatccacaaagagggataaaacactctttttctggtattcttgacaaaaattctcagttacatcatgagaaaacatcagacaaacccaaaatgagagtcattcaacaaaataactgatcagtacccttcaaaagtgtcaagatggccgggcacggtggctcatgcctgtaatcccaacactttgggaggccgaggtgggcagatcacaaggtcaggagttcgagaccagcctggccaatatagtgaaaccccacctctactaaaaatacagaaaaattagccgggcatggtggtgtgcacctgtaatcccagctactcaggaggttgagacaggagaatcacgtgaacctgggaggcggaggttgcagtgagccgagatcgcaccattgcactctagcccaggcaacagtgcgagactctttctcaaaaaaaaaaaaaaagtgtcaaggaaatagaagacaaagactaaggatctcttacagactccagaagactaaagaaaaataactaaatacagtatggggtcctggatagaatccaggaacaggaaaagacatagtggaaaaactgtaaaatttgaataatgtctataggtaatagtattgccaatgttaatttcctggttttgataattttgctatggttatgtaagatgttaataataagggaagctggatgagggataaatagaaagtctgtgtactacttttgcaacatttctgtaagtctaaagttagttcaaagtaaaaaattaaaaaataaataaaagtcctactgccaaaaaaaaaaatggtagggctccaagctggaaaattactgaggcagaactctagcctgggatctattcttagcatctagtcccagcatgaggattagaatcagaattgagggactaagagaaaaggaagagagagttgttatttatggtgagccaccaagtcccaaaaatattaaaaatcaaactttagagttggaagggttttgctgattaggaaatcaatcgggtggtagtgaggaagaagacattcacagaaggagtaatgaaaaggaacatggagagtaagcgtgtgacagctgcaatattagtttaagtgatacaaatgccagtcagtatggaaattagaattttatttccaaacaaatttcagatattcaaagctgccttcactttatgtgagattagcttaattctgtcactgatccttcatttgaagtagaaaatggtctatggagagtgaaggcctgtgactcaacgcaagcgtgacatttttgctgccactcagtccctttgatgaagtttatgactagttttatcattttttatatacagcattaaatcaagagattttatacacaaggctgtattgacttctagtcttttctttctgtatatagcccacaggcctgcccttttctttcttccctcacaagagtaacctaaaacttacttgctatcttcctccaaagaaataatgcaactctgctcatatcagatatgctgtggatgaaattgttttaagaaaaagtttaggaatttaacagaaggaaaagttgaaatgaaaaaaataatgtaagaaagacatagctaaaaaatgaaatttaaacaagttactttgaaagacaagaattcgccaaggagaaaggttttacctgctgatttattatgagtagactaatcctgaaccattcccaaggagctgtaatagtagtgactatgtatgatgactttctcaaaggtgtagggagtgatctaatatctcttaccaagcgcgctggtactaatgagaaactgaagggaaaaaaatctacattttcaggcttgttttctatttttatacagagggaaagttatacgtaatattaatagaaaatttggaggaagtaacagatgtttttgacagattgtatgtgcatatacctactacgtaactactttaaaagtctagtaaataatctattttgagccacagtgcaaatctaatgaagatgttgcctgaattctgcagatgcatcaagactttatatttggaatgccaaagaaatatctaaaaattaaaagagaggcagccacagaaggtgcaactttatttatttatttttaatattcttagttaaattttctgcctcatacctttgtggatatcatattttttactataattctaagtagttattgctggagtcaaaaatgttattaatttttacaagaaaatcttgtaccaaaaatcttgaactctattaattctaatagcttgtttttctctatatagataactatatattttaataataaaaactatcttttccatttaagtctctgctcttcctatttcttttctttttctttatagtgctacccacaatcactcgtattatattggatagtaatggtgaaagtgggcatctttggcttctttccaatcttttttttttttttaaattttattttaaggtcagaggcacacgtgcacatttattatataggtaaactcatgtcacaggaatttgttatacagagtatttcatcacccgggcattaagcctagtacccattagctatttttactgatcctctccctcctcccactctccgccctccggtaggccccagttgttgtttccctctacatgcctatgtgttctcatcttttagctctcacttataagtgagaacatgcagtatttggttttctgttcttgcattagtttgctaaagatagtggcctccagttccatccgtgttcctgaggaggacatgatctcattctgttgtacagctgcatagtattccatggtgtatatgtaccacattgtttttatgcagtctgccattgatgggcgttaaggttgattccatgtctttgctattgtgaatagtgctgcagtgaacatacgtgtgcatgtgtctttatgatagaatgatttgtatttctttggatttatacccagtaatgggattgctgagttgaacggtagttctgttttaggtctttgaggaatcgctacacttttcaacaatgattgaactaatttacactcccaccaacagtgtataagcattcctttttctccacaacctcaccagcacagaaggtgcaacttcagcattgtcttttagatgaaacattcagccaagagcacagatgggttttttttaataaaatcagtaaaataatgctttttctaaatatcacaatttttatctttaaaatggtatcttcttactttaggatgttgcagctgattttctcagctgtgcttagcctcaacatgtggaatcaattgaagtgaaatatgatgaaagtttatattgatgtagaggtttgctgtttgctttttatcaagtggagatttgtacccatgtagacctaaccactggcattcactgttcattgagaggacagatcaattgctgacagcctttctctttaggttccttacattctgtttaagatagataaaatacagtaggtaaaataatcaccagtctatctgaagaaaagtggagatttttaaaatacaacctctgatttccactttccatattgtgctcagacttcattgcttcactcacaggcaattcctatcttcagttttgtatatgtagtaacatttcctgtattgtttggggtttttttatgtttaatgagaaggatttcaggtgtttaaaaaatatcgacatttccaacatgtgttagaagaactaggatgaccataccagtagatgaggagtcttttcaaagcagagctctttagtagatgactggcagatgcctgatgagttagaggtggtgttctcgaagagaggcctgaagagctggagttcatatgtctatgagtgcccctaggacagatttcagttgccggtatataggcacaaagctaagtagctgaaaaagacagtatacagatccttaagaatgatggcagtgaggaggataaagatggtgatgataaatggcagcatcagctgacattgctgtgattagtaggtgctgagcaccatgctgagtgctttctctacattcaagctgaatctcccccttccagtttggtattttctacacagtccaatcccttttctgggtagtaatgagccagaaaagtggtccagattaaaatcccctttgtacttgccgtggaggcaaagagaacagccagaagacctggggtgagtgctgtgcagattctaacaaacaaaaaacagaccctagaactccaggtcctagccaggcagcccagaccctggatggtattaatgcttataaattttccatgttctttgattttaagacctacatctaacaaaaatctcactcctttccttcttccttttatctaattctgatactctttttctgtctctgcctgggtgctcagaaaacatttaatgctaattttaaaatctgaattactttatttttataagacttagtttataacacacctgtaatccaaaaattgatagaagtatatgtgtttgttgagactaacatgatttttcttggattattttattcctcatgctttgtttaaagattagactatttcctatactgctccatgctgaataaatgttagtgatatcaatgtaagtctttattttcagacttgcttcctatttcttgtaatccagaggaaaactccatttttatttacaaattttattctgggttatgatatcatatgcatacaatagaagtatcaaatttctgatcttacataaatcagacgttttctgagttagtagcttttatatttacttggaaaagttgaggaatgaagagacaaaaaagtattatgtaatactgagatactaagtgatttctagtataatcactcaatagctgataatcatagctattgctcttactactgataagcctgtttgcattctcatctttcttttgcaggtggttgcctatcactattgtcaagcagataatgcctacacttgcttggtgccagaatttgtccacaatgttgctgccttgctctgccgctcacctcagctgacagcctatcgggagcagcttcttcgggaacctcacctgcagagcatgctgagccttcgttcctgtgttcaagaccccatggcctccttccggaggggagttctggagccactagaaaatctccataaaggtacagataaggcccaaaggaggggaaagatggaggtttagagcccaagttcacccgggtcatactataaaaatgattgattttatcacattgccaaaactaaatgttccatagctggatatcctgtaggatacagttaacagacaagagattttacttgcaaaaaaaaaaatccagcagtaactactccttcctcttttctttataaaaattcttattcttatttccaaatagaatgccttttccttgtcctgaagatagtagagctttcagtcctttctgtgaagtttaaataagtcagtaaatttgtggctccaacgcagtgttgtgaagtttctatggttagaaatcccccctgtaatatgtaatattaataaaaaacatattttattaccccatcagttcatgtgaagtggaatggcctccatggttacacaatgctctgtataaaccagaaatcatttaactgtacactttaaaatctacttaaggggcataagggtattttacggtgcataaattgtattataggagagctgttattttttaaaagtgaaaaaaattaaatgagatccatctcccattcatgctcatgcctttcctccctttttcctctgcagttctagtgttagcagtggcctaagtgcaaccatttccttgaaaatggtacctgccttcttaagtcttcctgccccatactcttaacaatgttttgttagtgccagaagccaaagaaaaggatgtgggtatgcataaaattcctgagcaatcctgtttattcctgagagacttagacacctttctcaagggctttggaggcactaataaggaaagatggtttataatttctcctggccatcatcttcagttatttcagcttccatgctggttacttggatatcagaatttctctttctcctctactctgatgacctctgtcactacctttgctacctgttacctttttaaacattgccgtttctccacaagtatttttaagcctatttcctggacattcagtcaatctctaaaacctgttaattctgccttcgtcatgtttctcacacccacttggctcaattgtttctagcatcattaccacaaggactgttcatctgcccatagcatcatatctataattacctcatcctggtctttcctggttctcgagtttagtgctctttccacatcatgacacacttacaaaataataaaactttgtatagcatactgggataaaaatttataactcctcattgctggacatgactggccctgaggagacagctctgccaagcctcagatgtcctgagggctgaattttaagtacacttctaaaccattcatggcacacctggaggggaagttcttccccagtctctccagtcttctagactttatgtgtttcttccagataaagttttataaaacacttctctgatcacataattcctcaattcataatccgctgattgcctattgccttctgaattaactttcaattccttgttctgacattcaagatgcttgatggccagtatccaacctacttttcagccttattattcactgttatccttaggaaccctgtgtttatgtgtaaactaaaatattcactagtcctcaaatacttccctagattttcccacctccatatatttactcattattttccttcttgatataccttcttcttaaatctctgcctgtcagaattccacccatctatcaaggaccagcttaaatgctacctcattcatgaaatacctactgatctacctgcccccctccagtcagaaatgatgtccttccaaataacattagatcctttttcaaaatatatatatgtatttatggtacataacacataatgtataacaagaatttaaaattattattattaatatttattaaatatttaccatatgccagatacactttgcagtttataagaattacttttgtacttatccctttgagtaaattgtatgttattgaaattaggaactttgtaaaattcagcttttatccttcatagtggttacctcaccttgaacatagtaggcattttaggaaatatgttttgaacagataagtgaatatagaaactgctcacatgtaggagtaccttgaaagaaacacagtgatacaaggatctacaccttacagccaattcaagaagactatccatcccagcactttgggaggccgaggcaggtggatcacgaggtcaggagatcaagaccatcctggctaacacagtgaatccccatctctactaaaaatacaaaaaattagccgggcatggtggcgggcacctgtagtcccagctactcgggaggctgaggcaggagaatggcgtgaacccgggaggcggagcttgcagtgagccaagatagtgccactgcactccagcctgggcgacagagtgagactccgtctcaaaaaaaaaagaaaagaaggctatccaaatgcttgcagtcagctctggcataattcatatgttttatagttttgctacaagatatatctgcctctcatttaggtctccataaccagctttagtgatctctattataaatactgttctaagtggatttaattacttcattttatttccatgtttttaactcacccttaaatcaccattgtgagcaatagctggaaacacaattttccagctggaaatactaaaatttattagagtgacccaaaagaactcaagaaataaagaagaatattttttttagagatagaacaagcaaaatggtagatgtataagcaataatatcaacaattacattacatgtaaatgggctaagcacttatattaaaaggtagaaactgtcagactggataaaaagcaagactcaaccatatgcagttttttaaatataaagacacagattgaaagtaaaaggatagagactgtataaacatggagcataagaaagctggagtgactatagtaatctcagacagagtagacttcaagacaagaagtatttctaaagaggcatttgataaacataaaagggccaactcatcaggaacatgtattagatgtatgcacctaataacagaggttccaaattcatgaatcaaaaatagaccaaattagagaagtagctatagtcccaactgctctggaggctgaggcagaacagtgtaattaatgactatctagttatttaatgtttagcatatttttatcccgctaaactataaaagctgcataaccattgaagacatagcagctagtatggtaactggaacataaaaggaatttaggctaggcttggtggcttatgcctgtaatcccagtgctttgggaggccagggcaggaggatcacttgagcctagaattcaaaaccagcctgggcaacatagcaagtacccatctcaacaacaacaccagcaggcatggtggtgcacagctgtagtcccagctactcaggaggctgaggcaggaggatcacttgaacccaggaggtcaaggctgcagtgaaccaagatcatgccactgcactccagcttgggtaacagaatgagacctggtctcaaaaagaaaaaagaaagttaatcagtgtaattcatcatattaacaaaataaaggagaacatccacataatcgtttcaataaatgtacaaaagcatttgacaaaatactacatcaggggtccccaatccctgggccaaggatggatataggtccgtggcctgttaggaaccaggccacacagcaggaggtgagcgacggctaccgcctgagctccgccttctgtcagatcagctgcagcattagattctcataggagcacgaactctattgtgaactatgcgtgcaagggatctaggttgcgcacttcatctaatgcctgataatctgaggtggaacagtttcatccctaaaccatcctctccaccctccaccccagaaaaattctcttccatgaaaccagtccctccgaagtacaccaattagtgataaaaactacacaaactaggagtagaaggaagtttagtctgataaaggacaactccaaaaatacatgtagtgaaatgttgaatgcttttttcccctaaggtcaagagcaagacaagagtgttccctcactctcaccacttatattcatcattccactggtggtccaggctagtacaataagaaaataaacaagcatgcaaatagtataaatattggaaaggaagaagtaaaactgtctttatttgcagacaacataattgtttaccttagcaaactctaaggaatctacccagaaaaaagaaatctgactagaactagtaagcacaaagctttaggctataaagtcaatgtacaaatatttctatactaacaacaaaatactgaaaatgaaattttaaaactacgtggcagttttaaaacatggctacaaattctttgacattacttccactaatagttcaacctgggtcccctcccttcataactgggcaggcttgcaactgcttcagccaacaaaatgatgctatgtgacaactgagggaggtcataaatagccatgcagcttccatcttgttcaccaaaccacttgctttgggaggcatgtattgccatatatgaaacctgactaccctgagttcaccatgctgcaaagcacaaaccacagggagagtctagttgactgtcccagtgctcattcctgctctgccaccaaacatatgcttgaataagcttccaaatgattccaacttccaacccccagccccagacattcaggtaaccccttgctattcaatatagcaacaaataagtagaataaatacgattttcagtggcaccaaaaaatatataatacttaaaaataaatgtatgaaagatgtgtaagacttagtgaaagcacagcaaaaatattgcagagtgaaattaaagaacttagtaagtggaagagatatgtcataaatgaggattggaagatgtcagttttttcttaaactattctatagattaaacataatcctggctggttgcagtggctcacgcctgtaatcccaacactttgggaggccaacgcaggtggatcacctgaggtcgggagtttgagaccagcctgaccaacatggagaaaccctgtctctactaaaaatacaaagttagccgggcgtggtggcacatgcctgtaatcccagctactcgggaggctgaggcaggagaatcacttgaacccgggaggtggaggttgcagtgagctgagatcatgccattgcactccagcctgggcaacaagagcaaaattctgtctcaaaaaaaaaaaaaaaaaaaacacataatcccagcagaatttttctgtaaaaatggacaacttttagaaatgcaaagtaccaaaaatagccaaaacattcttgaagaagaaagttggaagataggatctggtttcaagacgtacagaattacagattactataatagtcatgacagtgatatgctagtaaatgtttaacatccagctcagggatggggggctgatttgatgcttaaaagtttagcaatcagctctcatgagccagcttgagtcaggtccaaaattccacagacaggattgtattcatacaaggatagaaaatagatcaatggaacagaatagagaatccagaaatagacccacatatgcagtcaattgatcttctctaagatgccaaggcaattagagaattcttgtcatcagatggtactggaacaactagataaatgtttggggaaggggaaataatctcaatccttacttcacactatacaccaaaattaatatgagatggatcacagacctaaatagaaaagttgtatctctaaagctaatagaaaaaacatagaatatcttcacaaacttggaataggtaaagatttcttaaggacacaaagtatcactaattatataaaaatgatgacaaattagacttcatcaaacttaaaaatatttgctcaacaaaaaataccactaagaaaaaggaaaagcaagtcaccaaagaggaggaaatattcactatgtttctgtgtgtgagagacaaagcacttgtatctacgatacatgtagaatgcaaacagttcagtttttaaatggacaagcgatttagacactttacaaaagaagatacgtcaacagcctacaagcacatgaagaagtgtttaacatgagtaatcagggagatgcaaattaaaattacaatgagaataccacttcacacccattagaataccacttcacacccattagaatggttaaaatttaaaagaatgaacatccagtgttggtaaggatgagaaacaactggaactctaatacattgctggtgggactatacaatagcgctactactttggaaaactatttgtcagtttcttttttttgagacaaggtctctcactctgtagccaagctgaagtgctgtggcatgagcacagctcactacagcctcgaccccctcggctcaagcaatcctcccacctcagccttctgagtaaccgggggctacaggcatacaccaccatacctggctaattttttttttttttcagagatgggggtcttgccatgttgcccaggctggtctcatactcctgggcccaagcagttttcccgcctcagcctctcagagtgctgggattataggcatgagccaccacacccagccaacagtttcttacaaagttaaatgtacatctactttatgaccaagcaactctattgctacgtatttacccaagagaaatgaaaacatatgtctacaaaacacttgtacaagaatgtttctagcagctttattcatagtcgtcaaaaactggaaacagcccaagtgtccatcaacagaatagataaattgtagtacattcattcaattgaatacttcttagtattaaaaaggaacaaaataatagtacaatcagtgtagaagagtctcagaaacgtgttaggcaaaagaacaagtgtctgcagtgatagaaataagaacagtggtttcctattgaggactgactggaggagaacctaacaaatttctggaaagatagaaatgttctaaatttgatcacagtattgcttacatgagtacatatagctgtcaaaacttatcaaagtgtatagttaagatctttgtaattcactatatataaattttgttgcaataatttttaatatagaattattttttaaaggtagctggagttttttcaatggaaaacactttcaatttagagtcagaagctagatttcaaattatgtattttctttgaaaaatgagtcagtatttttcacagtactttaaagttccacaagtacagtgattaaaatacatacacgcacacccacatgctcatataaaacaaatgaaaaagttttgaagtttctcagtacacttttgctttagctaccaatatgaaatgaaaggagacacaaattgttttgttttgtttcgttttgttgggacagggtctcactttgtcacccaggctggagtacagtggcaagatcatagctcactgcagccttgacctcttgagcccaagctatcctcctgcctcagtaactaggactacagaagcgcaccatcatacttggctaatttttttctattttttgtaaagatagtgtctcacgatgttgcccaggctggtctggaactcctggactcaagcagtcctcccacctcagcctcccaaagtgttgggattacagatgtgagccaccaggctcagctgagacactaatttgttaccacactgaaggaaagataactcagatattatgtgaagcttttcagaacaaagatattgtctgatatgagtcttctttttcaatttcaacaattcctatatataccagtaaaagaatctcatgtgccgagattcagttctgacttcagtactagctactatctcttctcttgcagtctctgtaattcttatttctctcaggcacctaggtagagtcttacaatggaactactaaggaagaaagttcacgtatttgttaggaatacatgtaagtggaggcagtggggaatccctggtgaacgtgtatttacaagggattaaaaataaggattttaaagggcttgggaaacctttttagtgacttgtcacctagagcagtggctcctaagcaccagtccatttaaagtttttagttagtccatgacaaaataagaaaatagcaacagctcagaatttgtatggatgtagatataatgtagttttccatatatatgtatgtaaagattagataatgtccctcctacttttttaatgttaaaatcctttttattctatgaaatatggtgatcgtggatggtaattatattttacatgttcttacatggcaaaatacgaagcagcaatcctttgttagtccccaatttatttttatttgtaaattttttttaagctactgatttaaagtactactctaaatatctacagaaatttgaatgagtgaacatactgaagcattcttgtaggctggttgcatttcaaagtgaaaatctaaagaacattagtatctcacctcttaaatttataattgagaaaccttatcatttagcaaaggaaaatgaattatttcaggaacagttctcattgttttacagcattagtagcattaggaaattatttgcatttatcgttctgaatcctaaaaattatgatatccttagataaatatgccctccttacttcctaagtgatgacattttttttgatacctacattagtaggtgacttgtaagtaattccttcaaaacaggaaatctcaaaaaaaaataataatcagaatttagaagaataaaattagctttattaagggggaaggcaagtacccccttttaaaaataaaaaataatatatcatctactttactcatgggcttaatctactaagaatttatgcaaatgaaaatgtaattttattagcaaatgaattattcattcattaaaatgtctggaccataatttactacacattactgatctccatgcttgagaatgtgtttgcaatgatatcccaaagaaaatcccaacagatgcattatcatcagctgttttgtctactggaaaatcatgactttcttatgaaggaacctggttgaagttattaaaggagatataattgaagggcggggacagtggtgtgctggtaaatttttaacagccacctgggagaggagggctgatttgtaatatttgccaatttttattgtgtaaatattcccaccatacacaattccaagctaccagctgtttaacagtcagagcttgaaaatattgcagtggcctctcctgaaccagtacagggatagatagctccagcacagtgagtgatactagctgatggtgcttagccaggcagaatgcaactagaaaattcctctatggaaattaaaggcatggttaagcttaagggagccagagccttcaaaatcaagaacataacacccacccccctcgttgtttgggtaaatcccagttagttccaagcaactcctctttcttccttaatactttgcactccctgaaggaatttcatgttttcttagtgcttcgtcatctagaataccactccattagtagtgattgttaatagagctggaatccatagttcatttcactccctaaaaacttggcagatgaaagtaattgttaaaattcttcataatttgagaactgatttggatattgaaattaaatctcttttataaagtttatgctttaggagaaaaacaataagggcttattaatcattgcaaaagatctgtatattttcaaatatggaaacaaaatagtatgttcagtttcaattggtcttgactttcaaaggcaaaaatagccaattttgtatgcaagtccacagacattttcttctgtcctcggcttcttctttttcctcctcagataaaacctgtttctcactccaggtatctgatgactgcttgccctcttccctctgctttccccctttcagagcctgtgagatcctgctaacaaataacttttatttgttattcacaattcacttagactaaaatgttctttcagtgtggaaatttttgaatctctaattgttgaaccaagaatcaataagcatttatcaagtgcagaagcctgaaattttcccaagctgcttcgtcagcatagccctaaagttaaattgattttgtcaatgccggatcatgtggagtccaagagagaactggacacaaacacagcagatgtttgtcttttccacttgactcctccacttttgggaagatcatgcaagggactggtctcattgcggctgctttaggtatagtctaggaagctgctacggtgttgggatctagccacctggttcaactctgtctaatgcctgggattccttttctctgttactctgtctcttccttcccactacacattcacattcacatgcagtcctatatactgttttagactttagactttacataaacctttttggggacattcccaaaagaacatatgatactattctctttaatgctgtcagatagggaaaaaaaaaaaaaaaaaacagaacatgttctactcagctttttcatgtgtaagagaaaaattacttcccatgtgcaaattttcttaactccaatactcaggctgtctcacaactattaatatggagatttctgaaaatgatgatatatatactcatatgtgacaaaagccttcatacctgattaaaagcaaaatgaatttactaagttaatttttccatgcccttagaataaattatgtaccctgagcattcactaaacacatgacaagccttttctaatattttgttccaaagaaatatgtgatcaaagatccagtaagaactcatttatccacttggtaattattaagtaatgtgtttctttctatctcagagagaaaaatcccagatgaagatttcatcattttaattgatggattaaatgaagcagaatttcacaaaccggattatggggatacaattgtatcgtttctgagtaaaatgatcggaaagtttccttcttggctcaaactaattgtaacagttaggaccagtttacaggtatgtgtttgtttgcttttaaaccataaatgattcctcttggaaagagcttagactgaaaaagttctaggtcctagtttcataaacttctactatgtcctagagcattatgaagaataattcccgaagaattaatctaatattttgagagatatgatctagaaagacattctttatacgtgactctcagattcccatttctgttgctctggatgaggtttaataaaatgttcctcaaaatagcatgaaaagaaagtcaatttttctagactgttctgaggacagcagtgtaaagatgatctctaacactttgactttcgtttaacattttttgatcatttaatgctatgcaaaattcagttcaatctacatcctagaatgagattttctggttcctccctctgcttctacttaaacaactcttctatagcatgaatatggactttcctctatatctgtcctcctttaacaaaaattggcaatattagggctttagattaaatttactacaactgagagagaaggtttttgttgttgttgttgttttttctaattactttcccttctcactcactggtcacttaatggcctggaataaggaccaggaatgtgagactgagcctgtaaaaatatatgggctaaagataaatgactctgctttccccagccttctcattgtagctgagttggtgtcccattctttacatattcacacttggtttggaacaatgtttctcattctttttataaaaattatttcctcctatgatgaatattaaaatctcaaacattatatgcttatctcactatttggatgcagcccccttgtcataagtgctgatgtacagaaaatagtctgtacatttaagtccctcctttccccctctgccaggcacttagcattatttccatatattgaccagttagcattactgtcttccatgatgagaaactatatttctaatcctggccaccaccttacagatgtttattattaatctcaaagtagtttgagctaaaggatatggataaatcaatataaatccatctttacaactaaaaattatataacctatcattattagtagcttgattgttaaaaatgaaagatgaatgaaagaaacctccaggaatgtaatctctgactgctttaccaaatggatgctttggagatgttatcctcatacatattctcacataatatcatgtgcagtctcaaaagaaattgtgtttccggatagagtaggtgactttaatttttcagctgtgccaacagaaaaagtacttcaactaagaatttttaaaaattatttcatttccgacagtgaaagaatttataggttttagaaaatgagccttcatttatatttgatcatcattatttccacaaacatttcttaagagtatttcagggactgttctaggggctggagattcaaaatgaacaagacaggcaatattcccatcctcctaaagcttatattttagtaaggaacacaaaaaacaaatgagcaaaaagttaaacatatactaaaattacaggtagtgttgagtgctatgaagaaaaacaaaatagggtggagggataactggatagtagttgttttagataggatatataggaaaggcctctcgtttaaaagtgatgagatctgatctgtcttttttaaagatttctgtcaactggccgtctacataataaaatgtaagggataaagagttgaagcagaagtataggtgaaaggtaatggtggcttagactagagtgataatgatggggaccatgtgaaatggtcatatttcgttggactgtattttgaaggagagtaaaaggacttgatgatgggctgaatgtgggtgtcagcaagagagaagactcaagaatgaatcctgggtatgttgtgagcaaatgggtgaatgatgatttgaggacaatagaaagatcacagatatcttctagaatttggtggtagagtcagtggtaatgccatttattgacatggggtgagttttgtggcgggggacaaaattaagtactgatttggtcacattgtctatgaaatatccaaatgtaaatgttgagtagacagatataagatgggactcaggggagatgactaagctagaaacataaagttaggcatgagccacatatagataatatttagcaccatgggactaaagaatctattgatgggagtgagaatggctagagaagaggaaagaacagagcccagagccctgggtgagctgggaaataaaaaaaagagccagcaaaaaagggaaggttaaaagtggccagtgtgctaagagagaaaagaggggaacgttctctgggagcaagctgcagaaagtgactccaaaaaaagtgcattgaggtgagatgcgttgtgtcaaatattgccgagaggttgaggaagatgagaactggaactttattatcggatttggcaaagtgaaagttactgatgcccttgacaagaaccatttcagtgaggtggtgagggtgcagcctgattggaacaaatggaggagagaatgggaaggaaagaattatagatagcgaatacagaaaacttttgtgaaaaatgggaacagagatacagggtagtagctggaaggaagaatatggagtttatgtatgtgtgacccagctgagaagaaacagatgcaggagagggaatgggtactcacaggagcaaagtccgtgggtaggtaagaaaggatggaatccagtgcataggagtagccacaaagccatatcaccttcccccagtagaatttccaacagattctattggaatctgttaccaaggtgccaagcttcctactgttagaagtgtacctttcggctaaggtatctccagaaggcccgcatttaaatgtagtcattttatacatctgtgttgtgtgggaaatttttttttaaatagtcattttattaggagagttagaaagccaactttttctaagccagtctttgaatctttgtacatttctcttactgacttgtacttggcattatgccctggtttacactgagaaaaattacagcaaaagagttatacagtgctccgttttctatttatttcaggagtgttgtttagaatgacgatcatgaaatcactccaaaagcactctttacaaagacccatttaaaaatatatcttaagtctcaatgttaggagaagttgtgtcccttctatgcaactaatttgttttactttttggatactaatacttgatcatgtttccctgtttggccacttcgaagttcagaatacatttgtgaacctcatagtttatcacaagagttaggggaaactgaaggtctttctgtctctttctctctctccatctttttaggaaattaccaagctgctgcctttccataggatttttttggatcgactagaagagaatgaagccatagaccaggacctgcaggcttacatcctgcaccggatacacagcagctcagagatccagaataacatttcacttaatggcaaaatggacaatactacatttggcaaactcagttctcatctcaagaccctcagtcaagggtcctatctatatctgaaacttacatttgacctcatagagaaaggctatctagtgttaaagagctctagctacaaagtagttcctgtttcgctctcagaggtttatttactccagtgcaatatgaagttcccaacccagtcttcctttgaccgggtgatgcctctcctgaatgtggcagtggcctctctccacccactgactgatgagcatatcttccaggccatcaatgctgggagcattgaaggcacactagaatgggaggattttcagcagagaatggagaacctctccatgttcctaatcaagcgcagagacatgactcgtatgtttgtacatccttcttttcgagaatggcttatctggagagaagaaggagagaaaaccaaatttctctgtgatccgaggtaagacatatatctgtgataaacaattctgagtctgttttctgtttattgcatggagtgtgagtattgaaagtagaagtgttcttcattgaacatttcacatagaagagacatcatctgtgtttcttctcaaggcaaggctataatgaggttaactaatttattgttttacaatgttatttccttaagactcaacatctgcatagatatttagaatgctatcctacgttcctgtgttcttctaaataattttcactgaccccacagggttcacaggctataattaagttaaccatttaatggacttcctcagtattattattctgatatgaagaaagaattgatatattgtaaatctctttgatttagggcagaatcatttcaaagtttttattgcccttttataaaaccttatcatttttaaagtttccagtgactaaatccattaaagtccagccaatgctaagctttatactagaaaatacaatcttaaacctcctagctgaaaaagatttgaagagatcagctggtctatccatgctgcctttagatacgtaaggtgtcattatctccattttgctataaaggccttaagatgctggatcaacttgcacaaagtcataaggttaatacatgggagaagggaggggcacacaccagaatagggatcacaagtgcatgatatatcccaccactccccaccccacacgcacaacaggatcactgatttaccccagcactctttcccaatgagcttgaacctgacttgagaatctttctcaactcaaaccagactagatatgaaactgtttccctttttattgcatgaaacctagttctctggcatcctggtcggggtgtgcttttactccgtcatactaacatttttaaagacgtattcctttaataaagttggtgttttcaaaagccgggtacattactgacttcatggaaacaaagaagacaccaacaacatagctggcaaatgcagagcttattttggctcaaaaagaagaggccagatttgactatgcctcacatgtgactcatcagaaagaataaaactctgtgttcatgctggggttttattgcccttcaccgtgtccttcaccaggccttattagagacaactgtactgtgggcatgctgctcagcctactccatgctgattcatcagaaaattagttccagattatgatgaagatattaagccaggcaatagactttgtagcattttctctgagagggaagcttttttaaagaaacatgctgtagtggaaagaacataaactcttgagtcaaattacctgcatataaatcctgcctcttctaggaactttgacctttggaaaaagttacatagtgtttctaagacttagttttcttatctacataagagcaataataatgccttttttctagagttgttgagaagttaagtgaggtcatatagtatgatgcctagaatagtacagagtaaaagaaacacttggggtatgttctttttcctcccctcaccctgcagtaatagacccttctggtgtatcttagttaaatcctgtggctaatcggatagcgacagccatcttctgctgttatcattttggagcacaagattttaaaaagaaacaataaaaacaatccaagtcccttctgtgaattgtatgatgttcccaaaaggattttactataaatcctactagagctgttgtcaatatttaatacaaagaactggcaactatgtatataggaaaaagaaactaatgtagaattgcctaataaacgctttgagatcagttcccagagaaactttgctagctgatctgggaccttagatcctgggacatctcagaggattgaaagctgaggtccaaggcaaccagactaccactgaattaatagtatccttacaacagatgaaatcctcaggggctctcagaggagaaaatacggcttttatacagccatatcatgactatacaggctttgccttctcaacatcgcattttaactaggagttttgcagcaaccgactgatgcactgggacaagaggagcaggtacttccaacttcaaatcctgtataatccgttccctgatgattgaatagcatggctgctgagagatcatcttatttcacttaatggcagagagtaaaattgtaaacaggaccaggagttatcaaaaaaagctttcttagatttcatttcagttggaactcagccccctccccagcaatggctggcaccaaccttgttactaaagtactgaagtattgatctcagtgcttaaggctccctaggtcaatgagatggaaattcactaagaatttaatgctattggcaaagcccaagctggtctttcaaagcagctggctgcacttgttttccatttcaggcaggtctgattagcaggactctctccaggcatggtttgtctttgtggccttcagcctccacttcttgcacattgtttctccttctgttctccactttctctccttctctctaaagcatctttcagtagatcaaagaagaccaattcagtgcctctgaaatcacaccaggtaagccagtgcctgacatgtacatctctgtggtgtaaggagagcttccagaggcaacacaacattcttaccctttttagtccattttcctgggctttcagcactcaattgccaaaaagtagttgatcttctccagaaataggctacccaaggaggttgcttctgcctgagctgaaaagagtcagtaatctgagaatggtgctggaagcaggaaatagcagagccagaggttaatgctacagctgagattgagttttcattattttgaataccagactgcttattgtctcagaatctgggcaaggacttgacctaccagagagaatgacctaacgttacatagatgtatcgttgtctcattgtcatagaaataaatgagtaacaaggtgagtagagtgagagagagagagagagagagagagtatgtgtgtgtgtgtgtgtgtgtgtgtgtgtgtgtatgtgtgtgtgtatcaaactgtaagcagagtatcactgaagaatcttttagatttgcagtttaggtaaaatatgccccttgaagcaatcacaaaccttagaccataccacctcattctgctctctgtttcccactgttcatcactgtcagccttctgacataccctgaacttaatctgtcctatgttttattctcttgggcacggagatatcagattaactcactaatttaataagcgaattcctgctattatgctaatagtaaagagatggaaaacctatttgaggcaacttgtgcatttaaaataagacatttgagagaagtagtcatcggcctttgttaggcaaccttttagtgactctcatagtagaaatttaaggctgatagagtagacagtcggagctaccagccttgtggtgcagtccagttactgcttaatatttctatatcgctttaggctcgccctgaataaatctccactctgttctgtttctattcctcattttctcaattttcatgatatctaactttcccttccataggaacggctctcagattaatatttgtgtgtgtgtgtgtgtgtgtgtgtgtgtgtaagattttgccagagattaaaagactactgcgttattatgtgtgtatttttgtggggtttgtttttatttttttaatacagtatctcactctgtcactcaggctggagtgcagtggcacagtcacggctcactgaagtctcaacctcctgggctctggcaatcctcctaccttagcttcctgtgtaactgtgaccacaggcacatgccaccatgcctaattttttttgtttgtagagaaagagtcttactgtgttcctggtctcaaactcaggttcaagccatccacccaccttgtcctcccaaagtgctgggattacagggatgagctactgcaccagcatttttttttttttttcgagacagagtgtcctgtcacccaggctagagtgcagtgatgcgatttcacatcactgcaacctctgcctcctgagttcaagcaattctcctgcctcagcctcccaagtagctgggatattacaggtacctgctaccttgcccggctaacttttttgtatttttagtagagacggagtttcaccaatttggccaggctggtctcgtactcctgacctcaggtggtctgcccacctcagcctcccaaagtgctaggattacaggcataagccaccgtgcccagcctagccagccttatttttaaatgtttgaataagatacaagaagcttgttgtgaacttcatgtaatgagtgttgagttgatacaacctaatgagattgtgatgtgggagcctaaggttgtgatgtgggagcctaatttggtttgacctgatttcctcaaattaaagacagcaaatcctgtgatgaatggaaagggaaaaggcgacacaaatcctacctataccatgggatagttgagtacttacttgattctttatgaccagaattgattgcttataataagtggtttgtcgaggtttttcctaatttatttgaccatattagtaagtgaattacacgttggagacctgatgctccaaaatccattgccacaaagcagggtgtcagagaacaagcagtttgtctaaggaaaaagagagggtgtcctccccaaagtgaaaaataactgtgccagaggtctgtataacagggcttcttatagaatagatggggttgaaatgactacaaaataaatggtgagttgaagtttgtgttgattttgttttttaaatctaaatatgagcctccaggcaagatgacaattaaccttaccctcactgaagcacaaacttgaggtcactgctcctgatagccattgcaggctcccagagcagacccttaaactggaggatgggttctgctttctcaaagcattaggagagaattcagcaaaatgatgaagcatgggaaggaaaaagggcctcttagaactaaatcaacccttaggaggcttggaagagttaaagcagagaaaagagaatgtaccagacatcttttattcacactttcaatttttttttaatttttaatttttgtgggtacatggtatatacatacatacatatatatatatatggttacatgagatattttgatataggcatgcagtgtgtaataatcacatcagggtaaaatatccatcacctcaagcagttatcctttgtgtttcacacaatccaattatactcttttagttatttttaaatgtttgattaaattattttttactctagtcaccttgttgtgccagcaaattctaggtcttatttattctttctatgttttgtacccattagccatgccccccctttccaccaacccctccccagtcctgactacccttcctagctggtaaccttcccctactctctatctccatgagttcaattattttaatttttagctctgacagataagtgagaacacgcaatgtctgtctttcagtgcctggcttatttcacttaacgtaatgacctccagttccatccatgttgttgtaaatgacagggcctcattcttttttatggctgaataatactccgttgtgtatatgcaccacattttgtttatccatttgtctgttggtggacacttaagttacttccaaatcttggctgttgtgagtagtgctgtaacaaacatgaaactgcagatatctcttcaatatactgatttcctttcttttgggtatatacataggactgggattgctggatcgtatggtagtgtcacaggatctttggggtgttgctttgccagccagaaacctctgtggctgacagagccttctgcctgagtattgctcacaccctttgggatcgttctgcctactcagctcagcaggctgcactcagctcgtgctactggcccagatcccacacctcccaagggtgagccaggcacagaacagtgagcagtgtgtggacaagagagcatggggtccagccactgcacaaccaggcacgctggctgctgcagcagggcaggcaactccaggcaccagcacaggtgccagctgcatgtgaggctgcggttgtaccaaacatattgcacgcagcttccactgcaggcaaccacgtctggacaaggggaatgcggtggcacctggaagcttggagacaccaggaactgctgagcccaaagagggtgtcacagccatagctcagggagtccctaggtctgggctcctcaaagaactgcagctcttctctccttctcatcgtccacaatgtggcgagcagtggggcatgtttcagctctttcagtcccgccattcagcaggtcctgaggtcttgtcctgcatccaggaagaatgatgttcatggacaactggagagtgagcaatgcagagaggagcttcattgagcaacagaacagctctcaagagatccaaagtgggaagctcctttccacaagcaggtcatccctgcaagtgtccagttctcaccagagaggagacctggattgagtagctcctatgcacaggcaggttgtcccgacaagtgtacaaccctcagcagagaggagacctggaatgggtagcttctatctacaggcagtttgtcccatcaagtgtgcagccctcagcagagaggagacctggagtggatagctcctatgtacaggcaggatgtcccaacaagtgtgcaaccctcagcagagaggagacctggaatgggtagctcctatctacaggcaggttgtcccatcgagtgttcagctctcaggggagaggagacatggagtgggtagctcctatctgcaggcaggttgtctcatctctgtgagtttggctgagtccagggtttttatgggcttcagaagggaggacatgcatgctaattggttcatgggcaggcctggaaaaagcaccataagttctcactcagggccatggactccacccagaactgacagcccagcccccatgcttcaggccgtttctggcctgaaggtggggcttcactggggacccactcctttccacccaggagcctgtctgcctcctgccaccatcaatcatgtcatccatggcacccaggctgttcatgccgagaggcacctgcaggccgagaggcacctgcaggcctgcaccaagccaccctcagcctaccctcagcctccctcccatgctcgtcagcacccaaagtccagaggggactgaggcagcatggggctggcgtgtcaacactgccctgaacagacatacacctggccgggtcacaacagtgcccagcttcagcctcagctttgctccgaaatcagagtgggcactgggaacagggagaggccaagtagagctggcacttctgagcctgtgggggtatggggatcttcccgggcccccaagagcacatggatgcccaggtctgcagccatggctgggcagggctcccaccctgacaactcaggagggggcagggctcccgtctgtttacagctcaccctagactctatttatagttttttttaggaacctccaaactgttctccatattgattgcactaatttacattcccaccaacagcatacaagtgttcccttttctccacatccttctcagcatttgttaattgcctgtcttttggataaaagccattttaactgggatgagatgatatctcgtggtagttttcatttgaatttctgtgatgatcagtgatcatatacctgtttgccatttgtgtgtcttcttttgagaaatgtctattcagatcttttgcccatttttaaatcatattattagattttttcctatagagttgtttgagctctttatatattctggttattaatcccttgtcaaatgggtagtttgcaagtattttcttccattctatgggttgtctcttcactttgttgtttccttcctttgctgtgcagaagctttgtaacttgctgaggtcccatttgtccatttttgctttgcttgtctgtgcttttggggtattgctccagaagtctctatccagaccaatgtcttgaaaagtttccctaatattttcttttaatagtttcatagtttccggttttagatttaagtttgcaatccattttgatttgatttttgtatatggtgagagatagggatctagtttcattcttctgcctatggatatccagttttcccagcaccatttattgaagagactgtcctttccccaaagtatgttcttggaaccttttttaaaaatgagttcactgtagatgtatgaatttatttctaggctctctattctgttccactggtctacatgtctgtttttataccagtaccatgccgtttgggtctatagtataatttgaagtcaggcaatatgattcctccagttttgttcttgcttaggatagctttggctattctgggtctttcactaacacttgactattagtagatgagcttacctccctgggaccattagtgcttcatctcttttcagagtctagacattcttcacttctaattcttctctatcttccactgagtggtaatcagtcttctgatgtcatagtttagttgtgtgatttccaagaagatatttcattgacctgtaatattattggggatttatctaatttgccaatgaatattttttcctattatccactttctaaccccctattggcatcaagagtaaatctgagactcatatctgaagtaatgacccaatgtcatggttttgtgatatgacaaacgggaggaattacatgaactctaatatatattttgaaatatgttcaatttgccaacacattgaatgtcttttagctttacaagtttgttttgtctcagcataaatcataggatcgacatctattagtcaaataggcaaactgttcccatctttcaccctgtcagaccattagaagatgggccacagcaacattttttttttcgttttccaaatccaaaatgaaatttggaaaaagctgctaattagaattcttctccaaacccagttaaaactgagaactacttattctgtcataaaaacttatgagagatttcctaagtctatatacatacagagatatagttctgcttgtgataagttggaaagagtgcatcgttttatgagttggcaagaatatacttgatcttagccaaaaggcccagaagtgatgacttggcaagaataaatgcttagcgtttacttattcatgaagcatttacaggccaggcaaggtggcttatgcctgtaatcccagggctttggaaagccaaggtgggagaatcacttgaggccaggagttcaaggttacagtgaggtatgtcatgccactgcactctagcctgggtgacagagtgagaccctgactcttaaaaaaaaaaaaaattacagaacagccaactaatgaaaacacagaggagacttacatctatattgtttgtaaaaggtaataactgctttatgtgtttaaaaatacatatagagcttttttaaggtggatatgttcggtatagtgaatactggttacagcaacttaatctaaaatgaggtggaagtagggcaggcgattaagggaaatttcttgtactgaaagtagcacaggaattagaggctaattattctattaatgagtctccgaagcaatactggctggatcaaaagataagaaccccacaagttttcctaggttgtcaaaccaagattaatggcacagcagtcaggaggagctattgccagtgtagtgcaacatgacagcatattctcttttttgcaagtaaagcaattcactcggccatctctagagactttcaaaagcgggtagatctccacattttcaacactaatagcgttccatcctgtcaaccataagaagccacagctgtgagacatgaatttactgtagccgtccacatatccagttggttctaccacccaaattttacttgcaagtatctgtttgtttccatctctcatgatcataatgaccacatcctgggatctcacatggattactttcacctcttggtctcccttcttgccctcttcgagtccattctccaccagcagccagagcaatcttataaaaacacaaatcagaccatgtaacctcttcctgaaaatcctccagtggctttctatgattagagtaaaatcaaagccagattgttcaaagccctgtatttatagatatagcttctgcctccctccctgaattaagttcattctttctccctcttattcacaattttctgccagtttttagaacttgcactttcccacctctgggcctttgcacttaacagttccctccatctggagctcactttcccaggcatctcatcacatagaaagatctctcactcctccttcagatctcagcttaaatgccacctcctcagaaagacttctgcttgtcacgttatctaagtaagtgcctcctggtttatctcttaatcataacatcctttttacctcctttctaacacttatcacaatttattattaattgtaggtgaatactcgtttttgtccacttttctgtctaaaatgagctcgatgaggacaagaaccttctctgtattgctcactgtgtcttcctaatgattagtagagtgcctggaacacagtaagcgcacggtaaatttttttttgatgacgaactaatgagccaacaaaggaatgataagtggtactaattttaagctagcaacttcaaatatttgagaaactcttcccacaactcaacagatagtatcttttgttcactttgttacctcctgccatgcctcgggagttaagtgaagacatgcatttcagcaagtattcagtgaatatttattaagtaatatatttaaggctctgtcttaagcactgctgggaatacaaatacaagtaagatctgtctaccaagacttacaggttagtgtttttaacagacacatttataactagctataattcaaggcagagtgctgtgctagaggtataaacaaagagctgaggggcatggaggaggaagagagaagtgatcaattttcctatgactaccgttggtgtttcaaactgacatttcagtggagtcatagctcttctgcctcatgaagccctgccagctacctaaagacttcttgttggaacagagaaaagatgaccattttcctagagctcgagatgcattaacagaacagaaaggcagtaggaagatgtgaggcaaagtgggagaaagcagcaaattcctattcagattctatatttacaagaaaataatgcttttccactcatttctataaaggtaccttttggtcatacttacagtttactttcacaagggtcatacatttccatattgactataaaacagcacaagggaaccagaaatatattttgaattcagcttccatgagaaagccatgaaaaaatatgccgaagcagttactgactgttaagtgaaaaatggaagaaataattttcgccaagaagcatgagtatcatttgctgagaatggatagccacaagcagactataagacagcaacaactaaagtttaactgttggcagaatttttaagaagagaagtggaaaagatcaggattgttaacctattcttaatacttgagtcatatgcacactcatttcacagtcttaacagcgacagcagaaatatctgcaaattcaaagtcaaattgagtactgaattggaaagtgaatctggaagtccttgcattgctcttccttgtacccacttgcttggttttattcattcatgaaacacaaaacacttagtgagcttcttctcctctacaccaaggactgtgctaaccactagagaaacttaggtggcttaagacacccctgacactaaagccattatactctaaagcaagcttgtccaacccacggcccatgggccacatgtgtccccgggaggctttgaatgtggcccaacataaattcgtacactttctcaaaacatgatgagatttttttgcaatttttttagctcatctggtatctgtagtgttagtatattttatgtgtggctcaaaacaattcttcttcttccagtgtggccccaggaagccaaaagattggatacccctgctctaaaggaaagtcagacacagcaaccaacaatagtgccatagtacaaagtattataggaacctagacaaagaggaaatacttttcagaagaggtaacattaaagttcagcctggaagtatgggttgaattctgttaagcagcaagggaatgcaggagcactgtaggcagaaaggaaaaggtaatggcagtaacagaaacaaggaggagtgagaacatatgaaatgcctttggggaactgtgagcagctatgatgagagaataagatgcgtgatcaggaagagaggatgataggaggtgtcactgggaaaaccttaaatgccatatttaagactttataattctgtagataacagggagcctctgtagccttttgagaaggaagaaacaaagatctgataactctggtgatgtgaaagatagctctgacaagtgatgtatggaagatgagtcgaaatgaagggaagagactgcaagttgggctacttattaagaggtttatagcaacagtctaggtgaggaatggtaagacctataacaggagaatagagagcagagtgtatgtgggagagatattttggtgatactgaaaagcacttggtctttttttatatggtatgtgaaaggtcaggacagagggatcaaaagtgacgagatttatcttgaatgatggataatagtgatggtactaaccaacatagaactttctgaatggaggaggggctctaacatgagcaaaggcaggaggaagaacaggcttatggggagaaagtgagtcctattttggacatgttcataatgaattgcctctgaggaaagatgcacagaatatatttaggaatgtgcctttagaaaatagacagagagaatgctcaaggcatgcagctataactttgtgcattaccagcaaataactgacagtagaagccatagtactaaacgagatcacccaagaatataaagtagaaagtttagaagcatgaaacagaatagttatatttaaatgctaaaagaagatgatgagccaaatagtaatttagagaggaattagagaaacaaaaggaagtaaggtcatggaagtcaaaggagaaggcagtttcaaggaggggatgctcaccagcaccttgtactgcaataaggcaaagggtaagaggccatatatggcttttgctagaatactttgcatagaatgattggtagcagaagtccaattcccataagttaaaaactacatgtgaaatgaaaaagtagagaccactaccatagactcaacttcccaaaattttagcaatgaaggaagggaaaagtttgaccatgttggttgacactggaaaacgggaagataaaaagtaagagactaaacatagaagagaggcaaaggatgatgagttctagaaacctggctatcaaaagggcaacttaaagtcctttttgaacaaacctttttgaacttttggaaacccatatctttttagttgccacactcgtgttcctagtagggctcaggagctacagaacattaagaacctggccagaagacacctttgtccaactggcagaaagggagatggaggcacggggatccttgctagaaggactaaattccccatgtcctaaacaatgattatctgatggtatcatctgaatttctcagaggaattaatcttactgaaaataccactttatcaggtcatcctacaagttacttttttgcaaacacaaagacccctggtaacacaagagaaacatccatttaaaggaacttccctctttcacctttcgctctttatggtgggctctggtagggaatctatcgatgataccatagtttgaatactttcagctagctgtgagtttgaaaaattacttcatgttggctaggaatgagtggtttggaatagacaggcttttatactggaaggctgctggggatagaaagtgactcattactgtcacgggacacaaggactcctcttccttttttcttctcatggagtgtgctttgacaatcttgtggaaaggaataataatttcagcttttttttttttttttttgagacggggtctcactctgttgcccatgccagagtgcagtggcatgatctcagctcatggcagcccctgcctcccaggttcaagtggttctcctgcctcagcttcctgagtagctgggattataggcatgtaccaccatgccaggctaatttttgtgagtagctgggattacaggcatgccccaccatgccgggctaatttttgtatttttagtagagacggggttttatcatggtagccaggctggtctcgaacttctggcctcaagtgatctgctcgcctcagcctcccaaagtgctgggattacaggtgtgagccacctcgcctggcctaattgcagtttttaatccctccatccttaccttccctacacaaaaaaaagaccaagcgcttttgagtatcaccaaaatgtctctcccacatacaccctgctctctcttctcatttaataggtcttagcatttctcacctagccttttgctataaacctcataactgatgtcccaactagtatcccaaatatctaatttatgaggatattatgtttgtttctgcccattttcactgatattgagataaacagttccttagtcctcctttctttttttttcttttttttttttttgagacagagtctctctctgtcacccaggctggaatgcagtggtgcaatctcggctcactgcaacttccgcctcccggggtcacgccattctcctgcctcagccttccgagtagctgagactacaggcatccgccaccactcccggctaattttttgtatttttagtagagacagagtttcaccatgttagccaggatggtttcgatctcctgacctcgtgatccgcccgcctcggccttccacagtgctgggattacaggcgtgagccaccacgcccggcctccttagtcctcctttctactctttcttcatccttctatccatcctctgttagcaatccctcataaactaattttcttgttttatttaaggtaatgctaactactgaaataagtaaaccccaaaacctaagtgatttatcacaatagaaatttatttttcactcacatgaagtccaaaggcaccacatgttttggaagaggtctgccctgtaccatttttcagagacgcaggccaatgggggctctgccatctttcacacactgcttcccagcgtaattgttgttttcatcaactggcagatgggggaagacaaaaaacagtggaagagtggaagattcttctgggccaggtctgaagtgaatattatttctgtctgcatttcgttaaccagaactgagtcacataaccccacttgaatgcgaggtccctggcaaggaagccacttgccaacaagaactcttgacttggaaggcgagcacaatctttggaggccgccagccatctctgcctcataattctcgtctcactaggtctctttaaataacccacattagcctccgtaatataaagacacttcacagcagcacatattatttcctccaaaattataagataggctttagattataagaattttcttgccagctagctgtaactataccactttgtcacatctgaccctcacacagaatatcaaagcacctggccaggtacggtggctcacgcctgtaatcccagcactttgggaggccgaggcaggtggatcacctgaggtcaggagttcaagaccagcctggctaacatggtgaaaccccatttctactaaaaatacaaaaaatgagccaggcgtggtggcgtgcacctgtaatcccagctactcaggaggctgaggcaggagaatcgcttgaaccagggaggcagaggttgcagtgagctgagatcacaccattgcactccagcttgggcaacaagagcaaaattccgtctcaaaaaaaaaaaaaaaatcaaagcacctaagtgttgtttctctgaagcattagaaggttgtatattaagtttgtcatcataatgaaatctgtgtgactccatattagtaactctgactagaacagtgagaaactgtccatgctagaaatatccagatttatttgttagcatgttttggtactacaaagagaaactttaagactagctatctcctggggtgctaagtgaaaacctattagaaaaacaaacataatgccattgtatattttgtgtgaaacaactgttatccaacttccataatgttaaatgaggatagaggggagtgattcttgctttagaaagggtttttctctaaaagactccatagctctgaactcttgaggtacaggatcatcaagtgacagtagttcctcactgccttgtaacccgtagttatccagaagtgagtgtcatttgtctccagtatcaagggactactcatgcctacaaatgagagtgcaagtagaatttgctctctgctatcctggataccaccttctctgacttttgtcaaaacacgcatacttatccagcaaaggggaggagggagagtgctgggggaaggatcctcaactgtgacctgtgatcaactttctcctaaaatatctaaaatcaaatataccttgaatataagatttactatcctcctgaaaacctctggtctacatgagaaatttatattcttcctgttagcgtaatttttaccttgtttcttagggatcagttagctctgtccttaccctcccctctgcctgaagttacaattccaagttgcatttgctagcagtgaacggcatctgtaccccagtaatttttccctgatctgtggacttctcttctggctgcaaaggtagtagggtacagtgtggaagggtaaggatcagggttaaggacagggtatcacatttcaccctgctacacacattaaagactaaagttccatttgaacacacaatcatcttcctatatgtttaaagtcatttgtggttactggtcattcctttagtttagcgttacactagttactctgaagaatataaaagaaatataaaataaaatgcattcgcttaatatgtctcacttaattcttaccacagtcctgagaggtagatgttactatccctgtctcacaaagaggttcagtatcttgtcctaggttataaagtgtgtaagtggcagaactaggatttaaaagtaggtctgtttgacttttagggatgaagaggcagcactgtgaatgccagtaaggaaatttgtaaagtaactttgaatcataaggtgatattatataagctatgtgaaaataattctcttctgtcttcacttccctaccccatggcctttatgaccatatctgaacccatgttaaagttgattatgattaccatcttttttttttttttttttttgagatagggtcttgctcgtcacccaggctgaagtgcagtagcacgatcacaatttgctgcagcctcaacctcccaggctcaagtgatcctcccacctcagcctcccaagtagctaggagcacaggcacatgccaccacacccgcctaattttttaaattttttgtggagatggggtctcgctatggtatccaggctggtctcaaactcctggacccaagcaatcctcctgcctcagcctcccaaagtgccgagactacaggtgagagccactgtgccttggcctcatcatctttaattataaagggaaagcatagttgtgctctgtcatgctttaaaacataccacgcttcctagagctgtctctaccttatttcttacctactctttctcaaaatgccaatcaaaaagtgtcaaaatcatggttgctgattttaattatgttaaaattaaagaattcagagtttatactatacaaatgagtatattgttctttacagtggtggattttttttcacacaagtgtgttctgaaacaaagaccaagttgctaatcttagtgtggtaattgaactagatttcagtggaactaggtttcagtagaactagatttcaaaaacactgaagttctcattctagctcttttacttcctaggcatgcgagctgggtctgtccctcaatcttgcttagtctctgtcaatcctctaccataatattgggagtagtatttactgctatacctatggtataatgattttttgagaatctaaaaattattaaagtatttttctgggtgcagtgactcaggcctgtaatcccaacagtttgggaggccaagccgggcagataacctgaggtcaggagttcaaggccagcctggccaacatggtaaaaccccatctctactaaaaatacaaaaattagccgggcatggtggtgcacgcccataatcccagctacttgggaggctgaggcaggagaattgcttgaacccaggaggcggaggttgcaatgaaccaagatcatgccactgtactctggcccaggcaatggcgtgagactctgtctcaaaaaataattattattattattaagtattttgatttttcagttgttgttggttttttttttttttttttttttgagtcagggcctcgctgtgttgcccaggctggagtgcaacggtgtaatcatagcacactgcagcctcgacgtcctgggcttaggcaatttttctgcttcagcctcccaagtaactggaactacaggcacacgccagcacaactggctaactttttaacttttttgtagagacaggatcctgctttgttacccaggctagtcttggactcctggactcgagcgaccctcccaccttggcctcccaaagtgctgggattacaggtgtgagccatcatgcctgggtattttgaaaaccttaagatacacaggtataagatgttattatttactcatccattctgcaaatatatacccctattacctagactctgttgaggatagaggccgtgctttttcccacgtgtggagtagagcaacatagaagagtgccctgcagtgggtgctgtaatggagatgtgtaccaggtacaacaggaacctaaggaaggaacccctgagtttatcggggggcaccagggaaggcttcacagaggagatgatgtgagttgccatttgaagaatgagaaattgtttttctgatgaactaaacaggaaagagaattccaggcagagggaaagcatgtttgaaaccctacagataatttactctgtttagaattgaaaggataaggtaaaaaggtaaagacagacaaataggcaagggacaaattatagaaagcccttggataccatgctaaggaatttaaattttatatcagagggaaaataaaactagcaaataattttgagcagaattttgatcaggtttttgcaatgtagattattgggatggccagggagtgagcagtcaagaataaaatgaagagaatgagatacttgtgacttttcaggagagaaaatataggagaggggggaaatagctactacgttttatgcctgagtaactggcaatatttaaaaaaaagagagagagatggttttgagggaaagctccaacttcaaaaagtgagtttgatagtgatggaggtggagagatccagcagaccgagaagcagaattaaatctcagtgctcaagatgtcaccatgggagctaatatagaatgtacattgctgtttccccttatgtcctacataccacaaactttgagtccagtgtactgatcagaaccatccttttagtaataatgtagcatgcttgtattcaaaaagaaatgaactatagttgccaccttcatcttatccttgacctgtattgcttgctgtttctcctcagtgcctgatgcaaaagcaagcagttatctctagccagctgaaatgaagactagagaaatgcagacatctcaccagcatttcttagttatggtggtaaaatgaaaacactagggtaaagtcaattctatgtctaactgaaagttcatttccttgtcaagcacaagcttttttacattaatcccaataggcatgaattctcattaacagcctaaagcatagatagtggatcagagacttatattcagaagttctagtcacagtggaacagccatggatgagtaacttaaagtaataattcttataccagggaggctacaataattttactgttaagagctggacagaattttgagatcttgagagtaagatacttcataaatgctttgtattgttgtctaacttccatatggtctgttaaaataacttactcaaaaaataacttaattcaaaaagaacaatctctattgaaaaaactaaaataggctgggtgcagtggctcatgcttgtaatcccagcattttgggaggctgaggtggccagatcatgagatcaggagttcaagtccagcctggccagcatggtgaaaccccatctctactaaaaatacaaaaaattagctgggcatggtggcacatgcctgtaatcccagctatttgggaggctgagaggagaattgcttgaacgtgggaagtggaggttgcagtgagccgagatcacaccactgcactccagcctgggtgacagagcgagacttcatctcaaaaagaaaaaaataaaataacctatcacctaaactgagttttcatgggataaataagagttcagggccgggtgcggtggctcacacctgtaatcccagcactttgggaggccaaggcgggtggatcatgaagtcaggagattgagaccatccaggctaacacagtgaaaccccatctctactaaaaaatacaaaaaaaaaaaaaaattagccgggcatggtggcaggcgcctgtagtccccatatgttgtgggagggacctggtgggaggtaattgaatcataggggcagtttcccccatgctgttctcgtgatagctgatagttttataagtgtctggcatttcctctgctggcactcattatctctcctgccaccctgtgaagaggtgccttctgctgtgactgtagagtttttaagtgtcagtaaagaacctggaacacaggggatgggacagctcccatcatacataggaatcatcaaatggatttcattccagtaagagtttaaaaagggactttaatttttgcctttacagaatttctaaattgtagtggataccaggtcaccttgtttgattggatgaattaaccataatagaaaggaagttatttaattgggagaatgtctcagacaagtgtagcttgcatggaatcatcagtatcatctgaaggtgtgagtccagggttctttcgaactcataaaatctggaaattgccactgtactcttttttttttttttttttttttagatggagtctcactctgttgcccaggctggagtgcagtggcacaatctcagctcactgcaagctccgcctcccaggttcatgccattctcctgcctcagtctcccaagtagctgggactacaggtgcccaccaccatgcccagctaattttttgtatttttacaaaatgaggcttggggcttgcaccctctgaagcaacgacctgagctgtatattggtcccttttagccacagctggaacgcaagatacaaagtctggagattgcacaaagcagcaaggccctgggcccagcccactaagccactttttcctcctaggcctccaggcctgtgatgggaggggctgccatgaaaaccttcaacgtgccctggagacattttccccattggcttggtgattcaacatttgactcctcattgagtatgcagatttctgcagctggcttagatttctccctagaaaatgggtttttattttctattgcattgtcaggctgcaaatttttcaaacttttatgctctgttacctcttgaatgttttgctacttagaaatttcttccactagataccctaaatcatctctctcaagttcaaagtccacagatctctggggcaagggcaaaatgccaccagtctctgctaaagcatagcaagagtcacctttactcctgttcccaacaagttccttatctctatctgagaccacctcatcctggacttcattgtccatgtcaccatcagcattttggtcaaagccattcaacaagtctctaggaagttccaaactttcccacattttcctgtcttcttctgagccctccaaactgttccaacctctgcctgttacccagttccaaagttgcttccacatttttgggcagcaccctactctctgcagtaccaacttactgtattagtccattctcacactgctgtaaagaaatacctgaaactgggtgatttataaagaaaagagatttcgttgactcacatggctggggaggcttcaggaaacttatcatggcagaaggcacctcttcacaaggcagcaggagagagaatgagtgccagccagggaaatgccagacacttagaaaaccatcagatctcttgagaactcactatcatgagaacagcatggggtaaaccgcccccatgattcagttacctcccaccaagtccctcccatgacacgtggggattatgggggttacaattcaaggtgagatttgggtggggacacagagtcaaagcatatcagccatagagagacggttctaagtgtcagcagttcttagaggccataacaaatggggtaagaaaacacatctcaaaggtgatctagtgtcctttaatgccagattttttcttctaaaagttttattgagcatttttatatgcagtagactatgttaggcactatggaagatataagtaattcagatttctttcgtgaatgtaaatagaaatacaaccctaaatatacatacatgtcacacatacatacacacacacattaacacttaaaataagtgtatcattaggatgctttgagctggaaaaaaaaaacaaaattccaattcaaatagattaaacagaacagaaatctattacctcatataacaagttcagaattagggcagctaatagggctcaaactttatttttctgcaattcttttagcctagccctcctgttgactttgtcctcaagccagctgaccacatgatttgcaagaaaactaaggcagttctggacatcatgggcagataagacaatatccagaggcagataaaagagctttctctttcataaacaggtttgggatctgttagcaaggagataatggggaacagatgctatcaggaacctcaatctagtggaggagagagtatgtgacagtatggcaaacactgtgctagaggatatacagtctacactggtagccatagaaagaaagccctccattctcagctggagggaaagggtaggggcttggtagaggctgatcagagaagacgtcacttggggaagaggttgtaagtccagtttgggtcgtgttgagtgtgaggtactgagacctccaaatggggaagtacaatagacagttggatatatactggcctaaggctgagaagaaaagtctaaataaagaaaaagatacagaatataggtggtggtgaaggctttgaggatggatgagctaatctagagcgaggaaagaataggaccaagaatgagattctgaggaacactgacatttaagcatgggtggaatgagagttgctgacagagacagaaaataaaaatgaaaatcttgtaatgccatctgtgtgtgggatgggtgtaagccaactataactgacattttgtggtatttatacatgtgatttggataaggaactgcctaggaacctttcagtacccattctttgcccaggagcaggtgcccttccccaaaaaaccagttgaatgatatagttttgttggaggtatgactggacctgaagagtcccccaaccaaagcagaattggggcattaacatttctattaaaatgaatcagactggacgcagcagctcatgcctttggaggccaaggcaggtggattacctgaggtcaggagttcgagaccagcctggccaacatggcgaaaccccatctctactaaaatagaaaaattagccagacatggtggcaggcgcctgtaatcctagctactcaggaggctgagggaggagaatcacttaaacccaagaggtggaggctgcagtgagccgagattgcgccaccgcactctagtctgggcaacagagtgagactccatctcaataaataaataaattaattaattaaaatgaatttctctttttttgcaggagtggtcacacgttacttgccttctggttttcccgccaagagggaaaactaaaccgacagcagactattgaactgggacatcacatcctcaaagcacacatttttaaggtaattaaagcagttggaaccatttttccgccatctctagcagactttcatatgctttatgtaagagactatttcagtgtagtccctgccttctgaagttcttttgctgcaaacttggttcatctcccaacacgtatggcctgttcctccctaggcctttagaactacattgtacatctcccagtgtaactaactgataggcttttcaggaaatgtatatgtataatcattgacaaggtgcatatacacctatagatgtgtgctccatacatgacctatcatctcctgaggacagtcatattgtagcaattagttgcaggttttcatgatgtctaaaaaatcactgagggcaattactctttccattttttaaaattgttttagtgacaataataacattcctggtgctatgactttcaaaccaacactaaccttccttggagctacttcccccaaatctctcttcaaattatatcccagtttttctcccattagtttgaaaacctttaagaactctataacatcagcttctctctcagccttcagaaggctgaaatggaggaccaaaaagaggacacataatttgtttgtgcatgtatgcattcatttgtttattcatcacttactgaggcattaaactgggtactagagatacaaaaacaaaaaagatacaatccctaatcttaaggaatttgtagttcagataacagttttgggttaacccacaaaagtggagaaggaagttactgtgctaatttttctgtcccacagtctgagagttccaatccctacagccttttcagaattcttttcctgcctcaggatggagaatatgggtatcttaaacagttctctgggtcaggcttcccccacaggatattgttaaaaaatgaaaccattgtcttcagagagaaagatggcattaaggataacttcaagagcctagcaaattcttcccaatatataagcacagagccagagcagcctggtcatcagatggacagaagtgaaacccacagtgacaaatcttgtatttgaatcttacttgtcttgtctaacaaatcactgtaccaaaaatgaccttacttagtaggagcagagtggagctaaaataactggcaaggtatggcattccagtttcaagcagactaaaaagtagctaataattccataaactctaagagcattgtcctgctgttagatagtaactgaaagacagtaacttaagcattaaccttttagcatcactatctgcctagaatcagatgcaaaaatgaagctaatccctgcctttgctgccccataaaataaataccacattcacagagaagtagcatgaagcttcatttgaccaagcttcatttgacgaagtattttatcccatacatggaaacgtacatttaaacatgccctcctgtcattagcacagttttatcttatactgatgcagacagcatggttgcctgagataagactggctccatgtgtgattcaagccataaatactctagtgtacagcatatggtggtgacgtgactgcaagctgaagaatgaagacttggactatggttttcctggtgctgcagtttacaggatcctttaaatgcagtgttccctgttgagaggctttaacttctcccaaactgctagaattctcaatctgcaccagctgtgggtcaaagacaaatatagactttatggttagaaatagttccacttgaaacttctattcagcagtgacacacaatccaatgggtacttttttccaattaattttacatttctctggttttatattcataaaggtgatgtttgtaaataacccgctttaaagaagctcattggataagcccccaaggttagtttttgccatgatcttcagatacctgagccacagctaaagatccctaagatgagattgctcttgtttcttcatgctttccctgttttcttaagtattcaaaaatcttgagcaagcttatcactggctgctaaacagttttgtaaatttagattctaaggaagggactccattaccatttattgccgacaaaaagatcccttacctgagcaatagttacagatactgaagaggcactttttcaagctattcgaacataaaattctctttaagaaaccatgagcttagaatttaattatgcattatttttggctacatcctggctggtaatgggatcacacttctctgcctgtcatctttgttgaattgaaccaaactgacgctcttttctcccgtacttcacaggaacaaagggtcaactccactaaccagaagaaatcaaaagtccatagtacaagtaaagctagtattccaaatccaaagctatgtatttcaggcgtatttcttatgtatctagtccagcctcagtgcggttctcagtgctgctttgtggtccatttactggaccatttagttgacattcatttaccaaggtccattcttactcagctccttttcccatttctttttcctctagctcttaataaagccaactaatgaaacaaacagcctaacttgtgagtcactgaaaaagatcaaagctaccaagtgtgacttcctttaactattttcctcccctcaccagcaaatcaatctatatcattatcaattcttacctctttttttcttgttttagaagaaaagatgttcctattcctctttaattgcattatgaaatatagaaaagtacagataattgcatgtaatcaaatattatctaccagatttaacaaatgttaacatttttccatgtttgcttcaaatatttttctttatttttaagaaatgaatgtaacaaatataatagataacgcttttgtatttctcttttaccccatttctctgtctcccttagagataactcctattctaaatgtgttgggatttagcacatgctaacacccctaacatgttcttctcatctatattttacacttttccaatgtaggttcctgttcataaacaatatatacaactattttgggttttttaatgctataagattctataacttttttctctttttcactcagcattctgtctttgagatttctctatagatgtaggtcagtgattttcaactctggctatacattagattctcttgcagagtttttttaaaaatacacacacattcctgagccttactcccagagattatgagtcattgttctggagtagaacctaggcttcatttttaaaatagactttatttcttagaccaattttaggcttatataaaagttgaacagaaagtacagagttcccacatactcccccaaccacaattttccctattattaacatcttgtactgatgtggtacatttgttacaattgaggaaccaatagtgatacattattattagctgcagtccatcctttatgttagggtccactctgtgttgtacagctctgtcgattttgccaaatgcataatgtcatgtatccaccattaagtatctcagcatagtttcattgcactaaaattcctttatccgccacctattcattcctctccccttaccctcctcaacccctggcaaccactgatctttttactgtttctgtagttttgcttttcccagaatgtcatatagttggaatcacacaacatgtagaatgttcagactggctcctttcacttagcaatatgcatttaagatttctacatgtcttttttggcttgatagttcatttctttttattgctgaataatatttcactataaggatttactacattttatttagccattcatctattaaaggacatcttggttgcttccaattttggcaattatgaataaagcttctataaacactaagaggcaggtttttatgtgaacataattttcagctcatttgagtaaatgccttagtagtgcaattaccagattgtatggtaagactatgtttagcttgcaagacattgccagactagtttccaaagtggctgtgccattttgcattcccaccggcagcgactgatcagtagtatttttgaaaagcttcccaggtaattctaatgtgcaccccagctagttgagaaaccactattcttttcttttcctgtttgaaaaaaatcactattccacatcattaatttaaagatggcagtatagcaagcatggtaattaagagatcagactctaaaaacagactgagttcaaaccctgtctctcttaattcctgactgtatgactttaagcaagttgtttaacttttttttttatatttttggagacaaggtcttactcttcaccccggctggagtatagtggcacaatcacagcttactgcagccttgaactcctgggctcaagcagtcttcccacctcagcctcccaagtagctaggactacaggcaaacagtactacacctggctaattatttttattttttgtagagatgggggtctcaccatgttgcccaggctggtcttgaactgctagtctcaagccgtcctccctccttggcctcccaaagtgctgggattaccaccactaatcttactaatctttaaaatggcaataatattagcccttactaagtggttgtgaggatttaattcattaatatatataatcctcagaagaggggctaggatctctaaaggctacacacatatatatatttggggttaagagtcaccaaaatataggtgactcttacctacatttaatagttatatatataaatgttatatatgtaacaattatagtagaagcccctttatatctttcccttaccccattctcctccctccccagtgataacccttatcctaaagttagcatacatatgtcaacagaaaggtaactgttacaggtcttagacacaattttactttaatttaatagttgggaaaaaagcatataatgcttagttgaattcataagtgtgatgtcttaggagtagaagaaattgtctgggattaaaaaggacaattttggagaagagggccaaggatggaaaatggtttggaattaaaggtaaagggagaaagcagcaatcagctgttttgtctgttttagtctattatagttgctactttttcagctaagatcagagaagtgaggtcctgaatcaggtgccaattacttttcctttttttagttggtataatggaaggaacatgaactttagagtaaaaacagatttggcctctaattctagctccaggagttgtgttccctcctaaataaaaatagtgataaattctacctcctagggctgttgtgaagattagattacattagagaagctaaatctggaaaggccctagcacagaacctgacacattgtagatctgaataaatgtcagatttcctgcctttttttccttcaaccatcatatgtaagacatgtcttccattgctaaaagcttcctctgttagactatggatatttcttaatgctgatttttctctctgaattcgttaatatagtttatcattcctcaaaaggtcttgaggcccacacatattataaattaggagattgaggcccaagtggggagtcacagctaagcttcctggtcttccaggatctacagtgcaggtgtgctcaagaacctaacttgtctggactccaaccctgagtaacatttagaattcttcctaaaagatctggaactattctatttcatatgccaaaataacaatcagaactacttagtgatgtatttgcttcagttttgtttgcatgtaaactgcatggccaaatgagagtttgtaattgatgtccctgttacttgcacaaattaaaagagcttctgaagtaataatgagcaatcagaagctgcccttacccacctttcctactgttttctgtttacccagctctgggtgcctacatgggtactatagtagacagattcagaacagagcccagcctcctcaaggccagagagaatatggactatgtagaaattaggtagccatttttaaataatcgaggaggatgaaaagggaaataatcttgtggtgtgaggggttaaaactggattctgtttcagcctcccagcataggattgtgtttctgggcacccaaaggtctactctgctaggatttgacccagccttttggctcatgctcttaggatagaatggaacgagaggatacgtagaaataattagcaccatccttcctcattttatcaagctgtggattttttgttgagaatgtataaacacttgcagccactttgataaagccatgtcaaaatgtcgcaaaatatatcaacttcttgaggcatattctatagatatatatgcataggtgtataaagatacatgtacatggatgattattaaaagctataatagtgagggagaacaaagcctagaactacctagtaatatgaaagtgttttaaagccagtaacagtgtatggaccttatgtgaatcccaattcaaaccaaaaaaattttagttcctttttttagctaatcaagggaatttgaacactgttgggatatttcatattatagaatccttcttagttttaggtatgttttaaagagttcatatctgttgagagacactgactaaaataattaaatattaactgataaaatatctgggatttttcaaaataatcccatcaagggaaggggatatgagcaggaatgtaaataatacaaggttggccatgagttgaaaattactgaagtgaggtgatgggtacatgagagctttactatactattcctctctacttttgtaaatacattttaaattttccttaatcaaaaatgtttaataaagtaaattttacgttgtttatatgcacttgtatgtatgtattttgcgtatatatagaaaatgtgttaaataataaacactaatgtgttaataggagtcacctcttaggattgagatgggaggtttatttttaataccatattattttatttgatttttataacaaatttgtattatttttataatttcaaaaactgaaatgtagaagtcttttttccttctgttttttggtggttgttgttttttggtttttttgagacaaagcctcacggtgttgcccaggctggagtgcagtagcacgatcactgctcaccacagcctcaaactcccgggctcaagcgatcctcccacctcagcctcccaagtagctgggaccacaggcatgcaccagcatgcctggctaatattttaatttttttgtaaagatgtagtctccctacatttccctggtctcaagctcctgggcccaagcaatcctcccaccaccacctcccaaagtgctgggattacagacatgtaccactgcacctggctgaaaataaaatttttaataggaaagttcaatgatttaatttttggttgcatcagaatatccccacagggagaaaaaaaaaggtgcctgtgtcggaaaagcctttaaaacgttcgtgtatctagccttcccacagcattattcacctttcagcctttcctctagtgtgagaattccctctacaggaagttttttcctaacccactttagagaccctgaactctctatgggaagaccttgaccaccatgactagaggtcttgttagatgaatttataactcataagttactgacacattcctcctttgtagatgccccttccctagtatgccgcataaacacaccttcctgattttgggtatatgtaggtattctaggcaagaacattctatatttcagggacaaagaaagcagaagtagcttaagtttttaaaagaagtacctccctatatctcttattacaacccaaatttcattgttaatatcttcctgccctcaggatttccttctttaactgatttgatccagatattgacagaagagtaagatgattgtcagagagtgtctaacaatcaggagatctgaagaacaaattattctaacttccttctggggaagcccatgtgaaaaggacaaatattagtacatgtcgtgggacctgtgccagtgatactaggagaaaatttgttgcggatggaaatcaagcctgtattgctgtttttttcctgaggataagcatatgtaatcattttgggatatattagttaaggtgaagaacactagctgctattgacaaacctgcaaaatctcaatgacttaacaaagatttatttctccttacatcacagtacagtgcagatgtctgggcaggctccttccgtgtagtagttctaaaatcaccttgggcctcagaattctccattggatcttctacatctggcctgtaatcaaaaggaacaatagaaagtgtagagaaatatgcaggaagttttggagccaagcctggacatgacatattatttatgccctaattttattcaccagaattcagtcacatggcctacctaactgtaaaggagcctgggaaatagagtttttccaaatgttcaggaagaaaatgaaatggaaatccgtgatcacattgcattatttctgccacagtgtgtaatttagtaacttgaatttaagagatttattgaagaaggctaataaaaaagatatggaaaaataaattatatccagatagaaaagagaggtgttgagtagacgtgttgctaagggctgcagagatggagactgtttcagttagcttgttcctgcaggactggtctttgtccccccacctaggctttgcttggcatgaacattgttagggtgagactccgctctcattcattagtaccaaaaacaaagaggccactaattcaccactgatgctacttttttttgctgggctactaatttaattgtctgtatttcttattcagggtttgagtaaaaaagttggtgtatcatcctccatcctccaaggtctctggatctcttatagcacagaaggtctttccatggcactggcgtctttacgaaatctctacactccaaatataaaggtaaatttataaagaaattataaatatgataaggaattaactatgaaaaaataaaactagaaggacattaagtagctatttagttgatctttgacttgtctttcttattagccttttattgataatttaatatattttaaattgttaaattttattctataaattagagactagctccattgtcctcttaacttctataagctgactctgacatatgggatcaggtcctgctggttccaaagagtaaattgatctcaggtagcctttgtcttggtaggagcttttctgaccaagagctcacttcgtagagactatgttcagcactacagtataggaggcaattgctctagttactatgccatttatgtaaaggagatattttacattatctaccaaaggaaaagaaaaaggagcaaatgagattataaaataaagcaattactaaatgctactagacactgttgtagaatgttagatggtttaataaaagatgactaaaaggatgtgactcctgtttgtctaattattagttctgtttgtttatttctaggtcagccgactgctgattttgggaggtgccaatattaattaccggacagaggttttaaataatgctccaattctatgtgttcagtcccatcttggttacacagaaatggtagccctgctgctggagttcggggccaacgtggatgcctcttctgaaagtggcctgactcccctgggatatgctgcagcagcagggtacctgagcattgtggtgctgctgtgcaagaaacgggccaaggtactggctgcccagctctgctgcttttcttccctttttctttattttcgatgcatactctttcttatctccagtgttacttcatgagtctgggtagagtatatcaaaccatgatggagaggagatcagagagagtgctggttctgcatatgtgcagggccactgccatccatcctgcaggagcacacagttctaaaccctttgagaggtgcttgggaaactgcatttatccgtaaccacaaaaagtttctacataacaacccagaaatgatctattgagctcagaagaagcctctttttaacaaagagaggaaggagaagtgaggaagccaggagactgcagtggcaggtctggaccaaatgacacctgcaggctctaagcctttcatgtgtagagaagaaaacttagccatggagatgagaacaggaccagacaccttcatcctgtccttgaagaccaccactctagagataaggggagaagatgattctccctatttatactcagactgaccaagggcacctcgaagtgcttctgttagtactgatcagttctctgaaaatatttccaaaatatgtttgctttatgtataaaaactcgatttcacaatattggtgaaaagaaaaatgctggtctcacaaatgtgggcctctgggaaaaaaaagtctggcctcatagtattttgtttcagtcctgaaaacaaactgaggactttagtggtttcatagtgaaatacaagtcatagtatgacttcattctgcggtattcagtgctgttacgaggggagaaagtgggactcctccactcctttgggaactgagacgtaggcctctcaatgacatctcagagccttagaagtttactgtagcacagtgattgtgcacctgtgacatcccattcatttgaatggacacctctaggaacaatgataactgggcctcgttactattttcgttttctttttagagacaaagtcttgttctgttgcctaggccagagtgcagtggcatgattgtagctcactgcagtcttcagcctccccagtagccaggagtataggtatgtgccaccacactcagctttatttttttcctattttgtagaggcagggtcttgctatattgctcggaggtttgctaaaactcgttggatcaagagatcctcccactgtggcctcccaaagcgctaggattacaagcatgagccacggcagccagcccttcttactattgctgtcacttcatattctgatcttagctgggtctttcctgctgttcagcccttacactgccaagccatccttttcttcatctttcattgttttccccagagcagaaatgtaactcatatgtacttctttcaagatcctatcacgcctcttctgcccttcatcactgtgatcgagctcatctcaaggtgcctgtatctcaaaactcttatcagttcttacgtacgctcacctctactttgccttagagaaggaagtacttaccttcctttccagagcaattgtctcctcctctacactcttaacccacggtgttgctcattctctcacgttatttcattctttttctaaattcacactaccttttttctcagtttctacaaacctatgaatgtagaaacctacctaacctaaaaaagaaatgttcctctcccttgctaaccagaagcaacatcccatctcttccctttcacctctgccaaacctgtcctaagagtcctctatactggctacattcacctctttattactccttaaccacttgcattctggcttccatgaatgagagaggaggcaactcattaaaatgataagctttaggatcagacacaactgggttaaatcctgtgtccatacttaatttatacaagggcttgaacaagtcacttaacctctctcaatcgcacttttcatctataaaaagggtgttaaaagagtcagtgtaagcattgaaagagataaagcctttttttaaaagaggtgttaaagtctcttttaatcttatatagtgcctaataaatagtatctgtaaaaaagaaaataacccaacctccctacattctaccaagctgctcttttaaaagtcactaatgactgccattcaccaaataaagcagctttgtcttattcctcacatctctgagcccctccatagtattagcaataataaacctttttttttttttttttttaaacagagcctggctctgttgcctaggctggagtgcagtggcaccattcttggctcactgcagcctctgcctcctgggttcaagcaattcccctgcctcagcctcccaagtagctgggactacaggcgcacaccaccacgcctggctaatttttgtatttttagtagagatggggtttcaccatgttggccaggctggtcttgaactcctgacctcaggtgatccacccaccttggcctcccaaagtgctgggattacaggcgtgagccaccgtgctcggccagtagtaaacttttaatgtcatttcccacttctctggctgcccctctcttcttcttctgatagaactgttcactgagatcctctggtcttccttccgtcctcatactcgccatggcttcagcattaaagtcataggctttggcgtcaaacccgactgggttctagttctcctacctacattttggtgactcttaaccccaaattgctaatttctgaaagtgtttttgagctgtagtttcacatttgtaactgcttccttggcaggcatgttcatatccctgactagttagttcctcagatccagctttctaaaatcactcagcatctttaccctcctctttctggattttcaaagtctgctaatgtagcctccgtttttctcagaactagggagtcattgacatctttccctcctttgcccttcctaattcatttagtggccagcacttttcaatgttatcctcaaaagagcttgagaagctactccttggtctctaccccaactgccactatccccctgaattattcttggagtcttcttgtgtaacaaacccgtttttcagattctcatctcatctattacacaccatccccttagcttttgtagagcttttattttgaagtaattttagactttcaaagatactgcaaaaatagtgcagagacccaacacaaagaaatgatacacgtttgaggtgatgggtatgctaattaccctaatttgatcattacacattgcatacatgtatcaaaatatcacactgtaccccataaatatgtacaattattgtgtcaatttaaaataataaaagtaaataaaataattctcttgtaggcaaaaaaaaatgcatagagtttctatatatcctccattcagcttctcctaatgttaacagcctaagtaattgtagtctcattatcaaaaccaggaaagtaatttggtgataatactattaactaatctacagaccttactgaaatttgtccaactgtcccactgatcatttttgcattagagaatccaggtcaggatctcacattacatttagtgttgtgcctccttagtctcctccaacctgtgagagtttctcagtctttgttgatcttttatgagcttgacagttttgaagaataccagccagttgttctgtagaatgtttttcaattttagtttatctaatgttttctcactgtgagattgagtgtatatatttttggcaagaataccacgtaagcaatgctgtacccttataaaaatgcagcactagaagtccctgctgttgataggtcttattacaggtggtgttaacctcagtcacttggctaccctagacctgctcaccaacacactgaccatatatcagtgatgatgcgacattgtccaagaaagtacataccaaggccaccgcacaatacctgtccaaaaaggcctccaatacggaataatgttcttcattatttcagaagtctttttcttcgctggattcttctgagcatttgatcactctagcttaatccctactccagaattaggaggacattgacccccaacaggcatctaaggtaatgtcttccaggtttctcagctctgaagttactgtttttccttttgtaattaagaaatatcttttagggttatgcttttgagactagaaagacagacatcctggttcttgtcatacttttgtccactaatattaggatccatcagtgattcttgctgcagtaagtattattattattattattattttttttttttgagaggagtttcactcttgtcgcccaggctggagtgcaatggcatgatctcagctcactgcaatctccgcctcccaggttcaagtgattctcctgcctcaccctccggagtagctgggattacaggcacccaccaccacacccagctaatttttgtattttttaatagagatggggtttcaccatgttggccaggctggtctcgaactcgtgacctcaggtgatccacccgcctcggcctcccaaagtgctgggattacaggcatgagccaccatgcccagccactgcaataattattgctttgatgtttgcctaacagtgattttctacttccatcattccctcaacatgtattaattgagatgttactgaaagggaaagcgatcccttctcccccatgtatttattcaagtatttattgatattgctatgaagtcatggatatttattttattccatagcctgaaatccattaccattattattcattttcattgttcaccttgccccagatttggccattgggaactccttcaaactgattcctgtgtcctttcaacttccctctattaatttttgagcattttcagactttctgacaccacaagatgttctagtctcatctcttaccccagtcctggaatcaaccatttctccaaggagccatggtttcttttatccattcgcttagtttttgaaaatacagttctgagcatgaaaacactcaatgacttcactgcctattggttacaattcagaccacttagcctggcattcagaaatatccatgctctgtcccaaaagaccttttccgccttagagtttaaacttccctttcatgtgccctactcttacaaaaagtagaatacattaatcattttccatctcagccagtcaagatagacctttctgtctgaatctgttcctgattctagccaggaattaatctttccttcctctgaaatgttatttcacttttacattcctttaaatttattgtatactcctttgttggacaggctcttgtcacattggtcacatctcccctaccttgttggagagtccttgagagcagaacctatatatttactgtcttattcacctaagtggtactttgccacatactctgtattcagtaaatattcactatgtggatggctggatggaactgaaatcagtaggaaagccagaaacagaacttatattttcaactgatctaactaccgcaggacaagtaccacctacctaccagaaaaggctactcatctaatgaaaggctactcatctgttgaaacgaaggcccttctggtaaatcaatcttgatcagggtcttctttcagcctaaacttgtaaccaacactgaaattatgaagactgctactggtgcactaagccagaagtgcctctagccatttggggcagatctttgagagtcctccctcctgctggaagagagaagcagactttgccaaagtttggtggtcaaatgattcatgatgtgagatgttttgcttctttggaaggccaaaaaattgtagcttcataatgtttttcttcccttttttgatttcaaagataattttttttatgccagcagagctaccagtttctcaaatcttggtctaaaatgaactatttgaggagacaaagaagaatttacctcaggaagacgaagctcaaactgagagttttggtttttgtttttcttggaatgcaaaaaaaaagtctgaccttttctgaggaaaagaagttcttcccagagggacatttagcatagttgtagctcagtaataatctaggctgagcagagtctcctgaatttgctcagagattggttccaggagtggaaaggatgattcttagtagcctaggcttgtgcagtggcggatgtgactagattgcgagctcagccacaagtctgtgttcacacatatctcctgtcctctcctcttaggtggatcatttggataagaacgggcagtgtgctttggttcatgctgcactccgaggtcatctggaggttgtcaagtttttgattcagtgtgactggacgatggccggccagcagcaaggagtatttaagaagagccatgccatccaacaggccctcattgctgcagccagcatgggttatactgaggtaagaagtaggcaataggattgttttttcaagctctgtattgaaggacccaggaaaccaggagaaaagattgcacgaagacaaaattgccaaccaaattaatgtgaattcgtgatcgctgctctgaataataaggagattaaactccatgaagcactttactcaaatgccaaagtccctcaaattataggtatagaaaggtgcgagttggaaaggaccgtggaaatgatataattattctccatgttttcctccctgtttaacagacagtggcaccaaggctcaaagagatgaattattgaggtgtagtcacatggttagataatgtggcacaggaacagcataacatttagaatctcagaaggaccagatttgagtcccagcctcgctattcattaactctagcccttgaacaatttacctatctcttagaagtttagtttcccatcagcaaagtgaagctaataaactcctttatacaaggctgttgtaagggatgcttggtaaactgttaaacattatacagtttatttattaatgataataacaataatagtggcaaatgtagggaattggtagtgtgctaggaaatgtttaacaaccaactgtgaagaggggtgtggggtggaacaggggtgtgtgtttgtgtgtgcatacgtttattataaattttactgatagaatgtgttgccgtggaatactacacagccgtaagaagaacaaaatcatgtcctttgcagcaacatagatgcaactgaaggccagtatcctaagtgaattaacacaggaacagaaaaccaaataccacatgttctcattgataagtgggagctaaacattgagtacctatggacataaagaggcaacagtagacactggggactactgggaggggaaaggaaggggaaagggttgaaaaaaactgttgttatcctcactaccaggtgatgggaacttttgtgtcccaaacctcggcatcatccagtacaccatgaaacaaacctgtacattcactgcccttgaatctacaataaaatttgaaataattaaaaaaaaaaaaaagaggctgggcgtggtggctcacgcctgtaatcccagcactttgggaggccaaggcgggtggatcacctgaggtcagaagttggagaccagcctggccaacgtggtgaaaccccatctgtactaaaaatacaaaaattagtcaggcgtggcagtaggcacctgtaatcccagctactcgggaggctgagacaggagaatcgcctgaacccgggaggtggaggttgcagtgagctgagatcatgccattgtactccagcctgggcagcaagagcgaactccatctcaaaaaaaaacaaacaaacaaaaagaatatgttgcacacaacttacaaataataatgaactatataatactcttaattgaaagcttttgttgatttttgccaaatttttagctaaactgtggttgtaacttataacgaaagtttgacaaatggagctgcatcccagtttgctcttttctcaataactgtattgccgttaaatctgatatgtgatctactgttaaactacttctcgtccacatacgaactatattcattgaactgaatcctctttcagctttagcactaaatgaagccctgatttataatgtttgccagtttcaagggtgtaaatactcccatcatggccaatttcaagctaccagtgtgacatcactgaaacaaagaggggaggagaagcatagtagcatgttgtgatgtaatattcccaccatgcagacaagacatgcacaatcaatataaataacctcaacagcatagataatagtaagatatagttaaataataggaagttgagagatttgagtattctttaacctttgtttttaatgttaatttatttaattgctatttgatttctaataaacaactggctttcagaatttctgagaatttaacagtcagctttcatgggccagtgcaagcatgggataatcagcaaaacagctaccatatcaattgagctgacatgtcaccaagggagtgttaagtaatattaaattttatcatctgtgggaggtttttgaaccgtgttcagtcaaattcccagaaacagaactgtcacttttcattgtgtttagagatttttctccctttactagttgcagaacagtccttatacatctgagaggaaaaaggaagataatcactttactctgaggaaacacagggccagatgcagtggctgacacctgtaatcccagcactttgggagaccaaagcaggagaatcacttgaggccaggagttcaagaccaccctggacaacatggcaagacccacatctctggggaagaaaaaaaaaacttttttaattagccaggtgtggtggtgcatgcctgtagtcccagctaatccggaggctgaagtgcaaagattgcttgagcctgggaggtcaagactgcagtgagtcatgaacacattactgcactccagtctaggtgacagaacgagaccctgtctcaaaaaaaaaaaaaagaaagaaaaacaggccctcagttttctcgtatttattttctatggcttttttatagggaggaggaaggattgcttctttaacttaaatatgaagaatatgtaatttttaaaaaatcacatgctatataagtgaattgcattctagagaaatgtgcaaaccatacctgataagacaaatgctcatcatggaagctgtgagtttctttattaggacggtcaattctgattccttttgtgtgcaagagatttagtgatacttggatcatccaagcatcttccaaacctcacaggctagtgtcagtagcatagttttccacctgaagtttgagctgacacaacttcttgtttcagattgtctcctacctacttgatcttccagaaaaagatgaagaggaagtagagcgagcacagatcaacagctttgacagtctctggggagagacaggtacctctcatggacgttgccctcaagaatgtgttgtgtttgtgtggactctcgaatctcacccccttattttttccctggcatacatttggcagtcttctgtctcaggcttttgtaatgcagactgattcagccaaactaaacagtcaagcagttttcctctttcaatcctctttgcctgtggattctccatactctttgcaccagagtcttctttcaaacaaaactttttccctctcttgtttccaaatatttttaaaagactgaaagttaccttacaatgtgccaaaccagagcagaaaattattgtggcctgtctcctttttatgtgatccttgtagtagttaggaataaatatttctcccatcaaaataactctttccccttgcatttgttaaccaggatgttaaattttcacccacacctctggcttaaccaaatgttactgtgatagcgtggtatctgacacaattaatctaatacattatgagtaaagttgctatctggatgcacaatgaatgcccagcctcatgcagttcctgttggtctgtagcaaatcagtttctgtatcgttcggtacaatgcaaacagaagcctcttccttgtggcctttgcaggaaatgattgttgtcttccctccaagtctaaactgcagcatctggagaaacattagtaaccttggatgtgtttttatgaaaccagggcaatgaaaactgtagagtaaccccagatatgtgtgatattttccaggagaagtagaccaatattgagatggccaatctagggagaatattttactaaacaagaagggtatgcatttgggttaggataagagtgttattaaaaataagaggttcttgaactcatttaaaatttataaagacctattgtggcatttcttctcgtgacaaagtcttagacacatttcctgacttctttaacatcatgtggaatggtccaaaactcaggaatttgcttctcgaataatccctccttttgtaagatccaaagggagcagatgcctggcagctgcagcttaagagtccatgacagattaaaggaaagtgtacagctggaaacagctgctgtctctggagccccaccctgagggaagccagaggacaggctgaggggaaggaactgggcaggacatcagccgctctggagtatgcatatgtgtgtgacccagagctgcaggagggacatgttggtgtgtttctatcagcacagccttctccaacagtgttgccacatctccagcagaccctttgttgccaagggcatggcggtgtaaccactgacagcagcaaaaagagtcgtgtccccatggtgataatgaatagaaattacaagactaatagtcatagcgatgaatatcaaacacattctaatggtgtacttgaaagaaatccttaaaaatattcaagaagggcgtgaattaaatggaggacttatttttattgacatgaatttcttattagaataaaattttatggcctcaggatttttaaaatattttattccttaaagtatacaataaatttttacagtgaatgttgtacatatgtaccatatttcaagattttaaaaaatcaaaacttcatgtgtttgcttgtaatcagaattgtgttgtgtttgacttatgcatatatacaatataattataatattataaacatgaagagctacttaaacatgagttaagatggaatttatttgtaatatgattttttttttctttttttttgagacggagtctcactctgtcccccaggctagagtgcagtgacacaatctcggctcactgcaacctctgcctcctgggttcaagtgattctcctgcctcagcctcccgagtagctgggattacaggcgtgcaccaccacacctgactaattttttttttttttgtatttttagtaaagatggggtttcaccatgttggccaggctggtctcaaacccctgacctcaggtgatctccccacctcagcctcccaaagtgctagggttacaggtgtgagccaccgtgcctggctgtaatacaatttctatatctatgaaaaattattttatttcagaaaaaattctggaaaataatgtttattatgtggcagtgaccctagaactcatcactagtatagaatggactttgatttactgttctatctactgtgatggttattaaacatacatgtgcctttctaacttatagcacatgatcatttaaattttataatgacctattgaattatgatgcttcctcccatgacaaaatcctatacatattttcacatacaaaagtggtctgtgacccaaagctagttggtgggggctcatatctgcaaccaggacctaagtgacaatttttaacctaaggaaaatacaatggtcgtgatgtttcctataatatgtatcacttactctatcaaatctaagacaccattaactttaagaaactatgtagccattattttatgtgccactacaaaaacaaacaacttctgccaactatactgacacaattctttattatcacattaactgtaagatgcattccaatttcagagatgttaaaatgtagagggagaaagtgaatcttagaatattaattgggatgtgatttttacatattagattttctgaaggcagatcactagagcatcctggttgctttcatcttccatttgcagcctctttatctttccagatgtcatcatcttacatccagctttcactatctgctgaccccctcccatcccgtagagttttcacagacttcttagggaacaccacagaagaaaagcaaacaaggtgacaagattgttcaccacaccctcctctcccttgtgttgtgggcacagaccaggaccagcgctgagagcttctagcaactctggaggccaaccctggaaatacatggccccaaaaagaaaccagagtttacgacataaacttactagattcctttaattcctgccctcatcatcatttgcctagattattgcagctacctcctaattgagcttctgcctctagcctcacccttttgtgatacatctctcagacttcagccaaagtggtctttttaagccatagtctgtttgtgtcactttcctgctttctgaccttcatttactacttgtaggattaagtcctttaatgtagcataaaaagaccagtaataacctccagtctcatatattgcctgtcttctccagtaattccaataacagtaaacatgttgttttcccctcattgcctttattcatgctctcccttggcccaccccacaccttccatgcctgtaaatctcctgttcatctttcagcatctaactcacattatcatctctacctggaggccatctcagaaacctcttcctctgtgccttccctcataccaaggacatatctccattgtgcatatcacactatattaacatattcgtctgtttccttactcaaccatgagttctttgagagcagtgtctgacatatagctcaataagtgttttattaatgtcattttgaatagcagtgatcagtttatttctccccagccacttccccctcctacccgaccccttgatcttacatgacctgtctgtgctggactcttccaaggttgaaagtagatgaaagagtcatgtgtatctctgcgttctctttagtgtcagcatcccatccaagcagactctggctgtttccccaactctgagctacatcctgtctgcctcttccaactccttagatgtttcccgttgaaaaaagaccatttctgtcagatcatctcgtcagatgctgacaagctaggaaacaaattctgttactgctcttttaggaagaaagttggttcctaactgctctgtttgcagtttggtgttttatagaattggctttaccttcatctcctttcttttagaaagttttaacagttttcgataaatctcatataaaatccagccatacaactccttgctcttggattttgaaaagcccagactccattttacatagttgtgttgttctgagatgaaattggccagctgtgttaaccatgtccagctatcagctgaaggttgctgccaaatgacatcataacctaaacaacagagatgatacaacaaagaaaaaggccaaatggaacattccctcacatgtaaatgtgttatccagtggggagaaatggggcagccagagccatagaattgtcagactggacagtatggctttccagatggtcactggttgtgaatattcagatgtgttctgtgaactggcatcattagtgagaggcttcattctgaaattctgtattttctctaggatgctgtaacttctttcgtgaaaaataatgtatttggcaccctcacatacagaggtttgctgcaaacttatcaacctagtaactactttaaacgagtttagaatgtgggttagaaattttccaaatggtttgttttatgcaccgagataattcttatggttcctagtaagtgtctatccagtcaaattattaaactactcttgtgttctgacccatatatagaactcacaatttgttttctaaccttttagaaatatgaacttgagaaagagggagcatcacttatatttaaaaaacaagagataaaacttctttgtccaggaaataattatagccattaacacctgagctcacccactcagggatggaaatgaccctcacctcagataggaccatgccactgccctcccgtaaggaactgaaaagaaatgccaatgtcaggagttccaactaaaattgaaaatacacataagacaagccatagatagaactggtttaagagtgcatgtatcttctaaaattaccacattttacttcataagtccttcttatccttgcagaaggaaggaaaatgttacttgaaggtttatacttgcggaaattacaggtagttttcattttgcatatgactcagtagtggataaatttggccaagtccagagacaaaatgccataatttgcacttaagtggaaatgaatgcaaatgtccatttgatgtaaattttacttgcttctctgaatacgttttaaagtttgcaaactgcagtatctgtgcctgccaaatattatcattttctggtttgttactggagtaggaggccataataaaagaagaacctgctgactactacatcaattttttaagtcaatttggaaaaaaaaatctttatcctcttcctttaaaatgaagtataactcctacatgttctaacagtgtttccatcctccatacccctcattttttaaaacaatagacttgtgcacctgagagcccatggttaaatgaaacaaatacatatttgttaaaagatagacttcatatctccaaactcctctttctactgttgaaacgacactctgaggacaaaataggcgttcgtaaaatctcctttgtatcagagatcatattgtcagtggacagtggcacaaaaagaagaatgtttctgtttttttcctaatgtgtctcttaaactcactgtagctatttttacctgtgacttcattattttatattcagaagaaaatagtctttgtcatacctcttctctcatctttaagactgctaccttgaatcattcaaatccttatataaaaaatgattgcaaatgtaccagaaacttctgtatcaactaatgaagaaaaagaatgaaaactggcccaagaccttggactgcaattcctaactttggttctctaggcttaagagcccaggggtagagcttggctggaggtagttcccagctaattctaaaacaaaacaaaaaaaaaaactttttatctctgcaaagactcttgtctttagattccacccacacgtagactaacagagtttgtagctaggaagaggtaccaaaggagaggtagaccaaagcagagaagacagtctggttaggaaaaatgaaaccaagtgagtttgattaaaggtgaattttcaatagatttattattattgtctccaaatattgtgaggcaatttaaatgtgtctttattcattatttttctttagaacttttctttatggaaaaggtggcaaaaatcattattcttagaagtaaagtagcaattacattaatgaaacacaaggatatgtcacgtttaacatggagcgctggagaggaccagaaccacctatcctcaatctttgttctctgcccttagccctaacagctgcagccggaaggggcaaactggaggtgtgccgtttgctcttggaacaaggggcggcagtggcccagccaaaccgccgaggagcagtgccactattcagcacagtgcgccagggccactggcaggtaagcagggcgaccacttccagtccctcaggcaggactgagttctaggtgaggacttctgatgcacagagcaaaatgatcacaagtaaagtttgggttacccagcagtgatcaggtttgaggacttggacctttgttatgagtattctggttaattgagaatacgacagttaacattcaaaaccatcacttgatacagattgtatagaaggactaactacttatgtcctggtgatagagtgacctccttctcacatttcacagcatccaaagactccttggaaggttcatttctcagcggacttctgctaatcacttacttgcagatgtctgagacttactaaaagaaaatacagtgaatgcaaattctaacaacacaatccttttagatgtttggattctggataaatgttaatttatacacttaggatggaaaggaaagcacactgataataatcttcagaagtatttcaatagaaaaaaggctgtagaagccaaacagccctaaagagttaccagagtcacttgattatgttcagttcagttgcaagtattaactacaggcagatttgcaaccactagagggcaataaaggagtgatttatgttggaacttccgctatgggattgtttaatcctacatcttggcctttgttaagttcttttttacttagtagctgagtcagacattgagagttgaatccttctcatttgactgtccctgagagagattaaatcacatggtactaggactatacaggtacttatgggggaagtggaaagatacatgggtgactcgtacagcagtaggaattcctacagagtaagagatagtgtgcacgtgtcttctcagcagctcttctttgggctaattggtccctgtttctctgcacttgcagattgttgatcttttactcacccatggagctgatgtcaacatggcagacaagcagggccgcactcccctgatgatggctgcttccgaaggccatctaggaaccgtggactttctgcttgcacaaggttagtcttggaatgctagagctggctggccagtttccataattacctggtgaactcatgatttccagcaatggatcccaggagatgctaagaacagatattaatccagttggttggaaaatgaaaggctatctcctcccctcttgtattcagtgtaatgtttttaactctgatactctctatttccttatgacttgagggatttaaatgaaattaacatattctaaattctcattcagatcagtagtctccaaactttgattttttaaaaatatatactcaataaatgttcatcttccggggattgtgttctgactttatcaattcttttgtaagcctgcacaactaatatttttcttgaattcaaaggaggcaaatgccagtgaagatccctgctgactctgggatgctatttgggggatcaagattattaccctgtagtaataaattccttttgacacttaccaacatccacaaattcctggtgaatgggaaataagttaaaggagatgatgatcacaccaccatcataaagtacgtcaggctcctgttggttgctgtgacctctatcacctgtgcataacagtggctgctgatgatggacctctgtagtagaaaaagctcatcactggtgactctgcagtgccatctagtggagcttgagcatttacttgaagcaagagacagaggcagtcattccagttagcctccactattagtaaactggacgcaaatgtcggtaattacatccacaagcacatgtactttccttcaagaaaaccaacctcctgaagaattatgcctaggccagagcagctgagggtagtttaattaggaagaaattaggtttcttctaagatttcaaactacagctcagtcagagacttactggatctttagctgtatcccttaagtaagatttttttccacagactcagactcaaggctgggtcagaatcagagagttgctcttacagggtgcgaagtggctcttgccttccccatataagctaccaaagaaatttggcttcatgctctctcccttcattctgctggggaagcaaggaggaggaaggttgggcctagattctcaagataagatgtgtccagagtaatattccagaacaaaccaagtccactgaaagaggcaggaactcttgagccactgataacctttagatagctgcaaagtacctgtcatgtgccagtagaggctccgtagccatagattccaggtatttgttctcccttaccagtgaagacattttcatctttggactgtttcatttttttccacacttagaggcttaatgaattcaacaaagatttatttaggctatgttattagcagaacactatactaggaactatgagtggttctgatttttttaattaatacactataacctgtgccctcaaagggtctataatgtggcagggaagagatgaaacaaagataaatgccttaaaaagcggagaatcctgagtgctctgatacaggcgtccgttgagttagactaggacagactttgaaattcgaagaggaaaaatgttttgtatttagggagaggaagtaacatagatgaaaggccaaagaggaatgacaggtttggagaaatatgcaagctgtctagtaaaatgtaaggggactacggaaaataaaattggaaaggtatgtggaaatggaaaaggaccaagttagaagaatctggacttaattctaaaggaatctggggaggctttaaaaattttaaataaggaattgatggcagagttatgctttaaaaacaatcactctggcagtatgtgaacagcagatttgacaaaggagccaggagatcagttaggaagccatcgtaatggaacatatgaggcataatgaggtcctaacccaagggcagtagctttcagcatagaacaaaaaagggctatgtgcaagaggtattttggatatgaagcctgattagatgtaggaaataaggatagaacagttaaagataactccagagttgtaagacggacatttgggagaattgtgatttcattaactgcatgagaaagaaaagagagaagaggaagattacaaattggattttggaagtatttaacatattatggatttgtttcatgtgtatctccttttaatttcttctctttccttatctttggaaaaatcagttcatctgtaatgtacatccaaaactttcttatcctactctttcctccactggatactttgtccaggaaatttatagatgttgcatctgagaaaacgccttggattctgttccgtatttaaacttattccatattagagtcagtgttttaattgcaaactataccattacataaatggctctcatcaggattaagggatggtcccttccagcttttcatcctcctgtgggaaaccatagactctaatgacctccagagatgcaaaggtgataggctagataactgctgagtaaaccctgagcctgctgtggcaggtgctaagcttgagctgacatccgaatcctgtccagctgagggggcagccaagtgtcctggtgcagtaagttgatctctgatgtagttaaatatgacatgcctactgtgtgaaaagcgttgtcttaggtactcttctagcaagtaaatgattcgcttcttaccattgaaggccttacagtctgggtcttaagaaccaaatgtatattggattttagactgattacaaaacagcatgtcaggtatgcttgatcctttcaagtgaaaatagaaatgttgaagggaaacagatccagaatatgaaagggtgggtggagaatttaaaagtggggatggagttattgaataaggctgagtagtttaaactctgaattttttgtttatttgtatttgttttttgtttttgtttttgtctttttttagaggcaaggtctcactccatcacccaggctggagtgcagtggcctgatcatagctcaccaaagcctggaacccctgggctcaagcgatcctcccatctcatcctcccatctcagccttcctagtagctaagactacaggctcacaccaccaccacacctggctaattttttagttttttgtagagacagtctcaccatgttgcccaggctggtctcagatttctggcctcaagcagtcctcccacctcggcctccaaaagtgctgggattataggtgtgagttactgcacccagccaaatatttatttttttaattgacaagtaaaaatggtatatgcagttatgtatcacttaacaaaggggagatgttcagagaaatgcattccaagaattgtgtccttaggtgattttgtcatttgtaaacatcatagagtgcacttacacaatcctagatggtatagcctactacacacctaggctgtatagtatagcctggtgctcctaggctacaaacctgtacagcgtattaactgcactgagttactgtaaacagttgtaacacagtggtatttgtgtagctaaacatatctaaccataaaaaggaacagtatttatggtgtacaacatgatgttttgatgcaggctgtatatcccttatctgaaatgcttagttatatatcgcttatctgaaacacttctgttgggattttattttttgcattttgaagtatttgcattatacttactggttgagcatttctaatccaaaaatgtgaaatccaaaatgctgcaatgagtatttcctttgagtgtcatgttggtgctcaaaaaggttcagattgtggagcatttctgaaatcagattttcagatgagggatactcaagctgtatatgtatacattgtggaatggctaaatcaagctacttaatgtgtgcattaccttacacacttttttcttctggtgaaaatgcttaaaatgtactttcacaacagttttcaagtatatattgttattaactatcactatgactatagttaactatagagtagatttagtgtactagttagtaactagtaccgtagatctcttgaacttatttcttctttctaagtgaattttgtgtctttgaccaacatctctccaatcccccccccccatctcctagtttctggtaaccaccattttattctttgattctatgaatttaactttattagattaaactctagatttctttcttgtcctgggctcagtgtcctctcgtgtttatttcccccacctggggagggagaaggggccctggcatcgtgatcaatgacaaacatgtcctgggctcctatttgatgagactgtctcaaggagttagcactattatcaatggaaggcttctgctcagctcagaaaacattcaccgaactctggtgcagtgagggccgaggcaggtggatcacttgaggtcaggagttcaagaccagcctggccaacatggtgaaccccatctctactaaaaatacaaaaattagccaggcatggtggtgcatgcctttaatcccagctacttaggaggctgaggcaggagaattgtctgaacccgggaggtggaggttgcagtgagccaagattgggccactgcactccagccagggcaacggagcaagactccatctcaaaaaaaaaaaaaaaaaaaaaaaaaaaaagaagcagaagaaaatgctcattgagaatttattacatgcaaatagtatacataaaaagaaataatggaataagttgacttatgttaagcatacttaagatgaggtagcagtgaactgtgagaagcttcttagaggcaggaggatggagatagttcctagagaatgagaagtgaggcaagtcatgggggaagaaaagctcttccacacatggagcagcatgaccaagagtgaggatgcaggaggatttacgggagatccgagaggcagagagtgaggatgcgggaggattgacgggagatccgagaggcagtgagcacatccatttggccaaagtggaggattctcacaggggaataataaaacaggtatagagagtaattaggaatagactgtggatgaccctgaatactcagtaaaacgactggaatctgttttattgaaagcttataggatgaacttttaacagttgagatacaactggcataccagcatcagtcttaaaatggaaatagtccagaaacgagcagtgttctttgcaggagcatgccccttcagcgtacttcccctcctgctgtgtgattccatgtctcctcagccctgtgctatcacttgcctttgcaggtgcctccattgctcttatggacaaagaaggattgacagccctcagctgggcttgtttgaagggccatctctcagtagtacgttctctggtggataacggagctgccacagaccatgctgacaagaatggccgtaccccactggatctggcagctttctatggcgatgctgaggtggtaagtacctttaaacaagcctcaagagagcagagagaggggctattctccatccatactacctggggttgaaagtggagtgatgtattgatgattcctgatacagagctctcagatctatacttgctagagagcaagaatattcaaaatgctgttaaagatcaaggatatagctaaggcctgaaatacatggcagcatagcctggggtaggccagcagttgaaaaagggcaggcagcagccagagccctcggtggaacagtgctgagccattacgcctgtcctaacttctctgcttgatccgtgtcctaggtccagttcctggtagatcatggggccatgatcgagcacgttgactacagtggaatgcgccctttggatagggcagtggggtgccggaacacttctgttgttgtcactcttctgaagaaaggagccaagataggtaggagaagggaagaggatgttggccatctgtgcccaggggccagactggtccagtggtctggctgccctgggtatttggtgtgagtgtatatagttccccctcctccctggcccaattattgtccaagtgaacagagaggctcttggcccagggaaagcgccatctgagccatggtctgcagtcccctgtgtccagaaccacgtggttctctaccatgtcccttgtagccttagccaggaggctgctctggccttaagcacctctcagcactgcctctgttccagccccactctatcagcatcctggatctctgcgctgccgtgagcctttgctttcccttgctctgaatgtgcttcagactcaagtccctgctgccgctgtcccagctgctccccaagcccacagacctatagacgagggttggctgatatgctggctttgtgctgcctgcctctcactgctgctttttccttctttttttttttttcaccttcatccatttttttttcctctcctacaactttttgttttctcctttctttgaaggttgtcagacgttaccgagtcgcccacgaggtatatttcaccgctgtcagcatcaggcgtggtctgatggcttggtcagctttgccttctcctctttggtttagcctgcatgagttccctacacctctaatcttttaatttacttcaccttaaaagaagattttttttaatgactgttgtagagaataacttgaacttttgataactaaccttgaaaagcatagtttgtaaataattcaggcatttgtaaactaatcaatttaaccttttctttctttttgtgggtaaagtcatcctcagtaatgttggtttgtttcacatctgattgacattcgaactgtgctcctgcttcaaagtgaatcccggggagtcctagttggtacttatcatttaagggaaactttagagttatcagtggtttcccttctgcaaagtacatattttaaagttaagaggctaaacatctgggggttttgagtcccaaatccaaaataaattaccctttttggacttttcaaatcctgtggtaatgtttaatataaatccttcctcccaattccttatttaaaataattccaaactgagccattgcttgcccacatgcagcacgcaggctttgctgccctcgcgtggggcaggctcacatggttcaagtattcttattttaaggtgaatacaaatccaatgcagcttcttggcagtgggagttactaaaatactcccaggtctaaaagatgaggtactaattgtggagcaagttgttctctcagcagaaattcccctagggtatttttttcacctagcttcctaccacccttacattgtatgagttttttacccatcatgcatcctgtacactacaggtccagccacatgggcgatggccacctccaagccagacatcatgatcatcctgttgagcaagctgatggaagagggggacatgttttataaggtgaggggagggagggacacagtttcttcagaacagccactgactgttttccatgtgtagaatcttacaaagtcttgataattctcatcctttgcgtagaggcaaagggaaactactgttcctcagtgatggcctcatatgttggggatcctggggttctgccttaccaagagagcaagagtagcctatagttgcctgcagctgatcaatctaaagccctggtttcacctggtcactcacccatggttttgtcgatttttacatggaatctgttaggtaggatctggaaactcatgagacaagtcaaagtaaaattatgtagtatagctatttccagtatgttgatcctagctttcatatgtcataatatatacatagattaaaaagtatatagtaacaatagcttatcagcatccttgaataagataaggaaaccaagacaaatagcaattataagatttgtttgaaatcattcactgaatgacaataacaaaaactgtggaggctttttgtactcacagtccaagctgaaggctccataccctgacacaaatgaattccttggtctattacatgtcaaagtcatcgcactggatcagctggattaccctgtcccgaagcttcatacaaatccaacccagtttttggcagcagtcatcactgacacttccccaagactaaaagataaggagaaatagttgtgaagcatattattctcacctgtgtcaggagtgtacaagttcctaggagcagaattctatcttctaagtaccctttgaatgagtcacggtaatctaggactcccaggctttcaggaagcttaagccctggcccaaccttgattttacgtgacttcatagaaggtcctcattaccctagatgtcatatttatggacttcacaatggcattactctcagattatgtcctggttatagcataacttctggtattctgaggcgaggagtcctcttaatgaaaatatgcagtgccattattgttcccctcagaattctaccttgaaagactccaaatctctccttagtgaatggtgctaagggaaaagtaaaagactgggatccctgtggagttgtaactatagagaaggaatagagtggataaagatcagctaaaggggtgggagatgccgcctgcatctttctggtctcagcttatagattttcagatacaaagtggaagaaaagttcaaggtcgctgtggccagatctctaaattggtcatagatttacttcctcttggataatccctcctgcaacatcagatggaatcacaaactctaaacttcacttttctactgccaccctactccatgcctttccaaaaatggggaacactgattggtattattttatgccatgagattagggaagcaactgctagactgctttagctcccacatccttcatgaggaagagagtgacttctagagggctggccaggtggagcgtcagaccaaaaaaacagttctccagacaagccagaaattaaggaggaagtaataactttggagtgcttggggttaggaagtcatatgtgttatagagagcaaaggaactttgaaatgagcatggtcagcctctttggaatccagttgggaagtcagggtccagggccttccatttgccaaggctttgcctccctggcttgtatcttgggtatcccctcaaccttgcctttcctgccaggtgagtttcctatagaaaagactagacccttctgccctcaccatcagggccagaactcctctctaggctggcgtttgggagggttagcccttagtaacagctgctgagaagaagaagggagtggggaccacacttcctcagctgttcagcagaccaactgtgtgtttcgccatcttgtgctcccattagaaaggtaaagtaaaggaagctgcccagcgctaccagtacgccctgaagaagttccctagagaagggtttggtgaggacttgaaaactttccgggaactaaaggtgtctctcctcctcaacctctctcggtgtcgcaggaaaatgaacgtaagtccctgtcaccccaactcctttctgcaatcctggtagctgatagcctgtgtcactcactagcttttaccaggcccctgaaatcctcctctgccccatttggaacttggttgtccttcacagagcactgacatttgcaatttgaaagaaatcaagtctaagtacaatctgtatctcaaactgtacagaaattaatgctgcgagtactttgcagctttctgaatgttcataatttaactgaaagtgatgagaataccatctttcccacccccataccaccaagtcagtgttctggtctttgggaaaatgtgagagcagtggtcactagaattccagttgcaattagatgtgaattgtagtcattactctcaggtatattcccttatcatttgaagaagggctaaggagagggcttggaccatggtcttgaaggtttaatttctgaggctatcgaacttttcgcctctttcctcatctttgtatcccagcatgctatgtcccttcttgtcctagggggaatctcagaactccccctggacctttatcgtctccctggtaagccacggtccttcctgcctaccttgcagacccatctcacatgtccccagacactgctccctcagccactgccctttaacgtgaagacactccaagccaagaaccctctctcaggttttggaaatagctaagattgtgtcaggagtctctgacatctacctgcctgaggtctcacagttcctcaggagataaaaataatccaagccaaacagatgtattgatcaattaaaaactcagctggacagaagcaagatttgaacctcatggccagggatcttccagaaagatttgtgtgtgtaacctttagatcatccattccagaccctaaaccctgacactggaaggaacctgagttaaacctgactgtctcagagaacatagccatgaccttcagaggcagagttaaacctgactgtctcagagaacacagccatgaccttcagaggcagagttaaacctatctcagagaacacagccatgaccttcagaggcagagttaaacctgactgtctcagagaacacggccatggccctcagaggcagagttgctccagggtgctgagggaagtggggatgtggaagaggccccccaaccccgggaagggagaaggtggcggtctcgggagacagattttcatgctcttggggtctcctgtgaaatgaaaggaacagcaccaaggcctcccctgcaccagccgatgaggatgaggcaaagctcagaagttgctgccaacccactgatctcttttccctaccaaataatagactttttaaaaatgccctcatatttttaggaataatgatggtcccaaaagaacaaataaaagggtaaggctggaagcagagcagggagagggtgacccataaaagctgaaattctttctagctccacatttgttcagaagcggttgttaatcacctcctgggccaatactgtgccaaacaccagacgtctgtcttcttaggtagaggatttcccatcaacttttaaaaaatttttttacctatgccccagggcctttgttctgcccaaggccttgttttctgccttaggactcatgaccataaccagaggctaccatgctatactgtggctttgacactaaaagaaggggaaagccttctcttttagcttagtatttaagggaatactgaaaaccataggctgcctagtcggcgttgttccccaccccaccccccagtctctgtttccaggggttctcaggaatgacatgcctgtgagcgtgttcctctagggagagcacagacctcagtcacagctggggtcttctcttgttttgttttatttttaattttaagtgtttcctaagtaaggaaccagttaaaaaaaggaacagatcagagaagcctctgtgaaatagaaagaaaacgataattaatgagcacctactatgtgccgggaactgtgcagggcttttaaatactgtatcacacttgatcctacccccggggtaggtatggatgagaaaatacactatacacttgggggttatgaagctggtcagagaattgaacccaggtctgtctgacaccccctctccctctagtctctgtagtcagtgcagtttcctttacagacgtcatcctcccggactttacaggacaccttctcacctgtcccttagaaagccacagtgtagtgcatgtagcaggaaggtgtggggctcagaccagggtccacgtgaaatgtggacatgtgtgcgtttgcctcctacatgcatggataacttcaggagcttcactggaaagggttggtgtttggcttccgggctgagaactttattagaaaggcaaaaagagggaaaattaaaactattttaatattctgggcagataaagtccagtgagcagtcgcagcgctacacaggacaaaggcagaaggaactttcagtccacaggccacgcggcttgagccatgtcaggcacgtctagcgtcccaggcgttccatccatgaatgtcaaaaaatgtacaaataatttgttttattcccaagttgtctattttttatatctcatcaatgactcatttgcacacctattgtaatgacaggattttggaatggcggaggaatttgctactaaggccctggagctgaaaccgaaatcttatgaagcttactatgcgagagcaagggcaaaacgcagcagcaggtgaggagagagagagagggtgaaagcaagaggtctcttttctgaaaatttggccaaggcagcgtcggccaccctggggcatatgtacccaaatacatctctgtccttgagaactgtcagggccaagctttggggatggctcccatagcacagccctcagctcaagatcagcaaatctgctgggctgtggaggccacgaatgtttcacttcgggagaaaaacactttttcactggagaatggcagcttcttccaagaagcctctgccgtatctcaggcatttttcaacccccagagcagctagcacaaagagacaacggcgacttaaagaaatcacttaagcagagcaccccacccccgctttagagggaaagtaggatggttcacttaacatcacaggttcctcttccttctcccataggcgtttgaggaatcccggattagttagtcttccctctggggctctcctcaagtctggtggcatcagacccccttccacctaaaccatcacccaccacacacacacagagtcaagaggtccttgctgccaggatggagaggaccctctaagagaacaccattccacattccttgtgcccatctgctttagtttggccactgggcagaaaagctcccagaataacctagaacctgccatcagtgatctttgtgtaacttgtcactgtctcttatgcctcctgccctcctcctccccagctgcatgggaaagaactgcttcaggttcactgctatggccaggggcacatggtcccgaaaatcacacccagcttgaggctagtgatggtggtggcagtgatcgcactcttacctagctggggcaacgaagtcctcacagaaatctgactgaaattctccttccctctgggtagttcctttttcacaaggtcagttgcccctgtcaggtgatattagtagagaagatgggaatgtctctgacagttcatttcttcatttgtaaattagagtctccttggagtcagctcagctccagccccgagtgacctagtcagcaagcctaatgcctgccccactttgatagagcaaatggagacacagcaattctgagagatgagggttagaaagggcagaggacagggttcttgcctagagtagaacaggcctgaaatttggagctaaaatattgagaatataaagaaaaatttctgctggatcagcaagatttttaaatatgtagttttttttgttcctaagctacttgacagtgaccctgtaaatgacaaccccacccaactctcatactgcctggtgtgtgtttgggcaccaaaacaacttcccgaagggcctggctggactgacaaaatggggcatttctccactattcccagagaggccagaaggaagatggaggccgaatgggttagggaatcattcggactcttccagaatgagtcttcctgtttccttccctataaatccaactaaaccgaaataccccagactcccacagacgccaccacagctctctgagatagtgaccatgttctcagctcttggtgatttctctggattcagaataactccagttcctgtgttcacattttgtcaagcagacagttcgcagcagccttagaggacctgaacgaggccatcaagctgtgtcccaacaaccgtgagatccagagacttctgctgagagtggaagaagagtgtagacagatgcagcagccacagcagccaccgccgccaccgcagcctcagcagcagttgccggaagaagcagaacctgagccacagcatgaagacatatactctgtacaggatatattcgaggaggagtacctggaacaggatgttgaaaatgtttccattggcctccagacagaggcccggcccagccaggggctcccggtcatccagagcccaccctcctctcccccgcatcgggactcagcctacatctccagctcacctcttggctctcatcaggtttttgacttccggtccagtagttctgtaggctctcccactagacagacctatcagtccacctcacctgccctttctccaactcatcagaactcacattacaggcctagcccaccacacacttccccggctcatcagggaggatcttaccgtttcagcccccctcctgtgggaggacagggcaaagaatacccaagccctcccccttcccctctccggagaggccctcagtatcgggccagccctccagctgaaagtatgagtgtctatagatcccagtctggttcacccgtgcgctatcagcaggaaacaagcgtcagtcagcttcctggcagacccaaatctccattatccaaaatggcccagcggccctaccagatgcctcagctccctgtggcagttccccagcaagggctcaggctacagcctgccaaggcccagattgtgagaagtaaccagcccagcccagccgtccattcaagcaccgtcatccccacaggagcctatggccaagtagcccattcaatggccagtaaataccagtcttcacaaggagacataggagtcagccagagccggttggtttatcaagggtcaattgggggaatcgtaggggatggaaggccggtgcagcatgtccaagccagcctgagtgcaggcgccatctgtcagcatggaggattgaccaaagaggatcttccacagcgaccttcctcagcataccgaggtggcgtgagatacagccagacaccacagatcggacgcagccagtcagcatcctattacccagtctgtcactcaaaactagatctggagcgctcctccagccaactaggttcccctgatgtgtcgcatttaatcagaagacctatcagtgtcaaccctaacgaaatcaaaccgcacccgccaactcccaggccgttgctgcattcccaaagtgtaggccttcgcttctctccatctagcaatagtatctcctccacctccaacctaactccgaccttccggccatcttcttccatccagcaaatggagatcccactgaaacctgcatatgagaggtcatgtgacgagctgtcgccagtgtctccaactcaaggaggttaccccagtgagcccacccgatccaggaccacaccattcatggggatcatagataaaacagcacggactcagcagtacccccacctccaccagcagaatcggacctgggcagtgtcatctgtggacaccgtcctcagtcccacgtctccaggcaacctgcctcagcctgagtccttcagtccaccatcatccatcagcaacattgccttttataacaaaaccaacaatgcacagaatggccatttgctggaggacgattattacagcccccatgggatgctggctaacgggtctcgtggagacctcttggagcgagtcagccaggcctcctcctatcccgacgtgaaggtagctcggactctacctgtggctcaggcataccaggacaacctgtacaggcagctgtcccgagactctcggcaagggcagacatcccctatcaaaccaaagagaccgttcgtggagtctaatgtttaaaagacgttttgttggagtgagacccatatgttttcactgcacattttcaggcttggtttccacattcgaggtagttctctggcttaatttctcatgtagtttctgtgtggtgttcagaggtggcagcccacatgctgaaatcctttgcatgcagccgactgggaagcggcctcccgggagccaggacttcagtttctcttgtctgtgcccagccacatgctctctccctctcttcagatgccaacgaggagattttcgtgctgtgtgctttaacccagggagatcagacacactggtcagctttttccaggagacaatcgctttcactgatgttcttgttgtgtaattgtctttttccttttttaaaaaataaggtgttcttgttcgttttcttctagaaactttagaaagagtgcgatgcccctttgcctttgcatccttagccagtgtcacccacacagccagccgcagcgcattctcatgctgtggcccctccccagaccgccagcgccctgcagccaccaggtctgcagtgtgcattaggattattgctggtcttcctagggggtaaaaggatcagagagagaagaattaagtgctaaattggaagaaaaccccaatataattatgtaaaatgtcactacattgattttccaagaggcattgtaggaacatgtcaaaaacagccagccctttaaatattgcagtcagccaaggaaattagatgagaattgtggctattaagagaattcactgagagttattctctagatttttagccgacaattaaccactaaaagctgctgcttttccagggtgggggagggaatgaatacatagaaaaacaaaaaagattgttctggattctcagtgaaaggctataggaagtctgttctggagacatctactttttagatcctgatacatcactgagtgtcatactccactaaaaggaaactctaaccgaaggctggctggtgtgacaatcccgttagttggatcttcacctacagccagattttgttctagtggccctcttcctgtaaacccagatggtgtcatacagaaattgtttctttcagaagcagattggaatctcttgggaccatgagactgagtcccaatatttccacccagggtcatgcccgttgttgtctacttccattttgagatctatagtttgattatctattattacaggaactgtttcttttctttttctaggagtgtttatgagagtgtgatattttaaagtcagacgcagcaaaaactgtttcagggtgaagaaagacccctttcagccctgttttgcagccctgggtgggggcatgagatagacagcaagcttctgatcttgaagcttgtctagaagacacatcttctaggtctcgtggtcatttggtaggctgacctttgagtgagcgaggccactattgagtggatagcaagaacattggaaccaaagcctcggcacaggcctggcactggctgtacatcagctcttacaactaaacaactcaactaagcaactgaaacgaaacaaaggagcattcgttctctgttgttaggaatcattctgctctgttagggaagggctgcaggaagggcagtttcctgaataaaaatctggctgcgaccagtcccatgtgtctggtaagtaagtaagtaagtaagtgccctttgaagggatcattaagacacagggagcatgaacctgagatcagaagcatttctttactaatttagattctgcgaaatagacggacctctccacccccaaacctaaaacaggccaggacttgtctctgtgctgaaagcaaatagcaagactaactcaagccccagcctctttccacactccctgatacctaaggactgctttctcagctagaccagggtgggcatcagcgacgccttctcagctagaccagggtaggcatcagcgtcctctctccatctctatacccctctctctcacatcaggaagatgaaatgtgtagctctagcggcaacctctagccaggagcccagtggcctctcagattgctttttggccaggtctcagcactgctggcatctttacatcttactccttaaaaccgcctctcgctgaggagccactgcattttgaagaatttctcagtgtctgtcaggaaagtgctcctgctcatttggaacgccacacaccacccgcactcacctgtccaggcgaatgagcaggtcctgtagctttacaaatatgccgctgatgccgcttctccccagggtctctcagttttccaggacaaaaagatttagggcctataccctatgggcaaaacacctaaaatgtcaacagtcaaaatgccattctttttggccatcataagagggagtaggtatcactgctgcatgccagttgtttttgactagaatatgccaaccagagcttgttggggcaggagacgtttttccttacaagcagactgcctgtgccctgtgccctgtttgctacttcactgccatggaatgatccgagtactgtatttcagagctgccccttccccagcagcaaacactcgctgagtccatgtctggcttcaggtgggaggaaatgtttcagatgaaacttactcaattcataccaccctgaaatggaggacagaggtgacaaacttcagtttaataggtttctcaccaagttgtatgttccattggcccaggattcttgcactaatgggtttctatcacatcatgtctataaatgggtgcactttactgtttgaatttgtaactgaagtactggatatttaagtgtgagtaatgtcttcattagaaaatagcagaaccgctcttgtcttttagtgtatttttcaagaaaaaaggaaaggaaagacatcaagcagtggatcacaacatttatagcacaagaaataacttgtatataagcatcaaaaagattaagaattttttaatatgaaaaatatttgcagtgattttaaagtgcttttccagcaatgttcttagggactcctgagacacggttactttatctactggatcagtaaggcacacaattaacaattaacaattaatgtttatttacaaagtaaagggaaaacctgtgtaacatgagaatttggcatgacaaaatggagaccattttgtatctgctgttgtatcttgtccgggttgcagacgtgcactattaaagtcccaagttaatagagcacaaacccttctcgctcctcccccatgtgcccctctttttagatgtgtataacttaaactcgatggctcaggaaaattccactaattagaatcatgtacagtaccccaggtcgttgtccagatatacaagtttgctaatgtagttaagcctggattattaaacacttttcctaaattattgtaaacagaacagcttagagaaaggtattctcagtccttaatattgtatagtagtttatgagcccctctctaaatattggtatttttatattccagagatgtacccaatagaaaaaattaaaaattaatcagtatctaatttaatatccataagtatttttccttagattttagtcacgtacagtgggctatgtggatgtcacttgtgcttcaccatagtttaccactaggtgtcactgtggctctgcactgcgcttgttttgtagcaaagaacagcggcatcccctcgggagagaggagctgcttccagggcaacaggcaagcgggctcagaggttcaggagaaggcaacagaggcctggaaggggtcttcgtgcatctgtgccagttgtgcaagacgaactctttgaacactacatgctttggacttcagccaggcagaggctggaagaaggttgaccagagctcccttgctctggtagagggatgggtacatggagaagccccttcttccccatgagcctccctcctgtcagttcctctcagcctccagcttttataactccagaagcgtcacagttgggtggtttgattcagagagagttatttttctactgcagaaatgccttggacaaaaccagtgctcactgaatctttgccacaaaatggaataggctatcccagggggcaagaggtgcccgcccctgtgcccagcctcctcttgatgctcccagtgcccagcagcctcgcacaccctgcctgtctgttcctgggctgcccatttctcaagaaaccgacctgcaaaggcagccggctgctgcctccacaccgagggctgtgcggtcctgctgctcgctcactgggaggtgcagctctttctcctcttcctctaggaattccagaccgaccatctaccatgactaacaacaatgaacaaagggcttaggggcaagagctacctgcaaagacgtgtcatggaacccttcaccatgcaatgccttgaactcagctctggctgctcccaagaaaaggtggctggctgggggcctggacacaagcacaatggggctggtggagccactgtgcagagctacttgaataatcactgggttttcatcaactccttttgtcatacagaccactcaagggctgaagtgttggtaaccttcatttcggtgtccaaagcctcacagcaggtgagccaccctgagatgcttgtggccacatggtggccacagtcagagctttgaaagtcagtaccaaatgaacgcataattggacaccaaaaatcaagtgttactttcatgtttcctcaccccatcatctcattgcctcctgctgactctgataccgacgctgagctgacttgccaggctgccgctggacgcgtagagatcaggccagcgccgcgctcatttttccaggtagacctactctgtggaacggaagtgccctagctgctttgtttttgtagcacttgctggctgaatttttcttttgctaatcgctaaccagaaagtctggttagagggggctcaactcaatccctttggtccccagcgccagacaagagttaattctggaaaattcagtacttgaatgtacctgccttattgcataccaatttactggggggaaaaaaaaagttaagagatgccggctccagatctccacttcattcacaggtgattttggaaatcctgtaagttacacttcctgttctggttttgttttgttttttgtttcctttggctgattcctgctgagtgaggccagttcctcatcaggctcagggcaggtgccttttcaggcgtggcctcctttccatctagcacagcatctttgtctctgttctgtctcctccaaatccaagatgattttaattagtacagacatgtacagtctacaattaaagagtgatttgtactaatatgattttgattcttcctcctctttgctgtcctttcaagacacttgctggaaaaagctttaatgcacttagttttcctttaggttttctatgactcagatgtaaaggactttctctgtacagtatattatccaatgcatgtttgttctctctcctgatatattgaacaccacacagttgtgaagccgtgcagtggggatgccccacaccccacagaggcatctacccctgtgtataaggaaagacattttcctttgctgtacttgcttgagcagttttattgtctgtacatgtgagctgtgtgagatagatgtgaaaagttcaaatgaatgcattttcctgccccatgtatacagattgtcatctgtacaaggaactgtatgtatgaaagcaaatgtacttatttataaatggctaacacttggaaaaccatggtgttgtgatgcttttctccttccattacagcctcttcagggagctggcttttaagcttaccctcctgaggatgcagtgatgggggcaccctccctcaggaggaattgggcaggttagggctaaggccaaattcccgatgatttgcttggtctcttgtgggacattcagagccacccctttgtgcatttatttgctcggtcacgttattgagcacctcctctcctcagagttggacactgtggtaggccctcaagagagctgtggacaagagacgccgttctaaggagctgtcagcacaggcctgtgacatttgttgagaaaggggggctttttcttcattggaagaggtttctctctagctatacccagggagcactgagctcttgtttcattttgtagctgaagctgcacccaatccagccaccctaccaaagccaaggctgaggtgggctgccagcttgagtggctgtgtttagaggctgcatgctgagagggtagcgagcagagggcacagctcccactgcagacctaagggcttcgtcacaactggaggcccactgcttccaggggctttgtcttttcatcagaaatctggtcgaactccagtcctcaccatatagagagctaggcagctgcattgtgaatggaaaagtggcaggtttcctgcaactggctggagactcaataccatctaaaagggagtggggaagcgggggagcagcactgagcctgcagcctttcctgtttaactgctacctctgtgtttacttcagggacaagcgaggagggagaccacttcctcttgacatcagatttgtgctaaacaaacattcctgctgtgcatacctgcatttcccaaagcctagggaagcagacaaactgcaggcaacacacagcccagcctagatgccacagttgccttcaaagagaagaggggactctggcagcagccacctgctcaatctcaaaaccattcctgggctgctccagttatttcattaaaaaatgggtaagtcggggccgggcacggtggctcacgcctgtaatcccagcactttgggaggctgaggcgggcggatcacgaggtcaggagatcgagaccatcctggctaacacggtgaaaccccgtctgtactaaacaaaatacaaaaaattagccaggcgtggtggcagtcacctgtagtcccagctactcgggaggctgaggcaagagaatggcatgaacccaggaggcagagcttgcagtgagccgagatcgtgccactgtactccagcctgggtgacacagcgagggtccatctcaaaaaaaaaaaaaaagtcattggcaaaaccccagctttttaatttatattttttctttcttttttttttttttttttttttttttttgagacagagtctgtcacccaggctagagtgcaatggcgtgagcccggctcactgcaacctcctcctcccaggttcaaacaattttcctgcctcagcctccctagtagctggaattacaggcacccgccaccatgcccagctaatttttgtatttttagtagagacagggtttcgccatgttgccaaggctggtctcaaactcctgacctcaagtgatccacctacctcagcctcccaaagtgctggaattacaggcataagccactgtgcccgacctagatgttttgttttgtttttagatggagtctcactctgtcacccaggctggagtgcagtggtgtgatcatagctcactgcagcctcaacctcctgagctcaagtgacccacccacctcagcctcccaagtacctgggaccacagtgcatgccaccacgccctgctaacttttgttttgttttgcagagatggagtcttgttatgttgcccaggctggtcttgaactcctggcctcaagctgtcctcccgccttggcctctcaaagtgctgggattacaggcatgagccaccacacctggccaaacccccagctttttaagaagtcctgggacattggaggaaaggaaaaggagtgattcatttaaaatattaatacttcttaaaaagaatttaccctcaaccttaataaaaagctactcagagtagaagcaaacagcaaactcagcagaagtctgtgtagatcctccgaagcactaagtaagtcagactttcttcccctggatatctgctcatgggtaccttttggtaactgcaggcagacacagtacgcacgtgcacatggtggccaaactcccctgcggtcggctgggaatgggtaggcgaaccagcggggaatggagtcaccctctttcagctttaaaaacaagttggaggagcttggagtcttggcagctgagttattccattctcaggaataagatggggcactgataacaggtatcatgtctggaaggccctgtgatgaagagagggcccacatagaagagaaggtgctcagagtccattctaacaggccatcctcttgggaggtccattgtgtcccagacactgtgatagggacttcacatgtgttccctaatgtattcctcacacctcgacagacgacactgctgtctccaaaacaaatgcagaagcagatcctgagagctgaagttgctcagggtcacagaggcacaggtaggcctctgaatcagccacactgacagctcttccctccaccacgctgcctcctctctcagaagggatggtctgaaaagagcaagcaacccgaatggcgccccacggagtgcaggcgctgggtccaggaggatggcttgggaaatgccgcgtgcttgtttggagaaataactctatgccacagtcaagaggagtcgctttgggaccccagtaagaaaatgaggtccctgctattatccagccagagattcgtagaggaagaggtgaagtggctggctggagagggaggcatcatcccttggtgactgggatcacttcaatattcacagagacccataagattcagaggctggtgcaaaaaaaaaaaaaaaaaaaaaaaaaacagaaatgagatgctgactgaggaaccagtttgtgacatgtatcaagccttgtgctttgaatgcttttcagtaaataaaggtccacactcagctgggcgtggtggctcacacctgtaatcccagcactttgggaggccaaggcgggtggatcacctgaggtagggagttcaagaccagcctgaccaacatggagaaaccccatcatctctactaaaaatacaaaattagctgagtgtggtggcgcatgcctgtaatcccagctactcaggaggctgaggcaggagaatcgcttgaacccaggaggcggaggttgcagtgagctgagattgcgccattgcactccagcctgggcaacaagagcgaaactccgtctcaaaaaaataaaataaaaataaaggtccacatggaagccttgattcaggagggactctacaggtgccctaaggaaagacctctccgttctggctcctacacgttagagaccagctacaatgcagaagacaaagttgagaccaacgcggggaagcagggactcctgttaccttattagaggatttgctgttgggtccctttaaatagtgagctctggtgagtttttaaattgctttaagtaagtcagaggtccccagccccagggccacagaccagtatgggtctgtggctgttagaacctggctgcacagtaggaggtgagcagcagcgggtgagcatgaccacctgagctccgcctcctgtcagatcagctgcagcattagattctcataggagtgcagaccctattaattatgaactacgcatgcgagggatctaggttgcatgctccttaggagaatcgaatgatctgtcactgtctcccatcacccccagatgagactgtctagtttcaggaaaacaagctcagggctcccattgattctacattatggtaagttgtataattatttcattatatgttacaatgtaataatataaaaatgcataataaatgtaacgtgcttgaatcatcccaaaactatcccccacccccagccctggtctgtggaaaaattgtcttccacaaaacctgttcctgctgccaaaaaggttggcggccactgctttaagtgacaaggcacaaagcgcacagtacgatcccacccaaatttgccaaaaactcaccttctgcctgagccacgtacgtggatctaaagtggaatctcagctcgttccaaaagctttgctcctcttcttaaggatcaaaaagactgatttcaaagggaaaggggtccattaaacactgggggaccttccttgccaaggctcttatcaggctcttgcagctccaccatccaggccaccctctcaggctgagaggaaagggcttatctaaccatgtggaaacaacactgcctctgctgggtcgagactggacaaccgctgggccttttcagcccctaggccatgatcaatatcactaatcgctttaccttctgtgcccagcctgcggatattcaatttctctcaggcctagagctaacgtcatgtgtctggctgctaaaagctccggctccttttattaccacagtaaaggaagataacaggcgagaggtctgctgtagacatttattgaatcatctgttgcaccaacagcacattgtatttcacagaagattggccacaggcaaaataaaataacccaccacaaatccgcttctgggggccttcttcagctccttagtcatccagtgttcactttggcaaacagaccagtttacagacttttgttgcaaatctaaggttccatttctctctgtagcattccggctagagagagacacgattgtactttggtagtttgtctaaggcggagttttcccacatgtaaacatttcactatacaagtgtgtgccagctgattgaagaactgacggcacccctacccctgaagagtgtacagtctaaacaggaggcgaacactgtcatccggacaggctgagaggaggcggggaaaggggctcgaaggagcctgggcagaccctgctggggaggggcctggactacaaccacctgctcccagaaatgacactgcctgaggcaggagacacagcaaaagccaactatgggaaatctgagcattagaggagactggcccctttctctaagacggcctcaggtaggaaaagggcagccattacaagaagaagagtcgtcaggtttggaaactgtatattaagcccttcactgaagtacacagtgtctgtgtgtgtctcaagctaagccatgctcctcaaacacccaaaaagaaaggaaaacagggagagaacagtcaccagatccaagaagcacatgatcggtgttcttttttttttcttttttgagcctgtcgcccaggctggagtgcaatctcagctcactgcaagcgccatctcccgggttcacaccattctcctgcctcagcctcccaagtagctgggactacaggcgcccaccaccacgcctggctaatttttttgtatttttagtagagacggggtttcactgtgtttgttagtcaggatggtcttgatctcctggcctcgcacacgatcagtgttctaatcacactatttccaggccgaagccaaatggtgactcagctaacatgacactctttatggggctggagtgatgtgcagacaccacgggggatgactgtagttgttctgactccatcctgacttcctggaaagatgggcagcagataaggagaaggctcgtcctccagaacagaggcagcagctccagcagccccagggggctctagccacagccagcagcagcggtttttcatttaaaaaattataaggtttgtgccctctgcctcccagcctgagcagagcctgggtgagcctgggagaggaaaccagagctgagccgcaaggggggtgctacaaggagggagccccagcaggaaggggctgcaaggtgccccccatccccaacccccatgtctggagcagcctgggaggaggcccgcctgcatctgccaagagaaagtctgtctgaagtcatgggcttctatcccctctcccaccaaagccatcctagggctaaagggttaaagaagaggaaggtcaggactacagctgggccacagcctcatctcagagcttcccaggggccagtccctcccctctcctggggaaccttgctttcaccaccaacatactttacacatcatatcacttgctcctctgccaaaggccgggcccatttgtgccacgtgttattcaggctggagggactccttgtttgaattcagcagccatcgtggcctttccaggcctgtccctgaggcccccccagtttcccctggccttgccccaggcatctgctgccaggagggtggggcctcctctctcgcttctttaaagatctgtgctctgcgaccaggaccgaacacccgaagtcctacccaaagccttctgcactgaagggggcaacagagacacgggagccacacacaatgaactggtctatagcagcggagaaaggagaagcagaggaggcggagacctgaccccagaaagcagcactcaaacagatgcagctgcacccacgcgcccgcctgctgccagagccactctccggagcctgcagtcctgaagacgcctcagcaggggcaggcaagaagacaccccgcgaacccccagggccggccgggcgcatcactgggagccggggctatctccctccgtcagcgtcttgaagtccatggagagggcctgctcttccgcctgggaaggccgcttccagtcggcccgggtcaagatgtagagcaccgccccaccgaagcaggccagcagcaggcccagcacgttggccaggacaccctcgggctcaaatgcgctatacttgcccctgcaggggtgagaggaagggagaagctgcccaaggggtcacaattaggccaaatgccctttgtatcctgggccttaaagatgccatggggattccagcaccagcccctgcctccctgccctgcctgaagagaacaaccatccccccgcccccaaccagcaatctccagctatggctcacagacaaaaagagatgggcaatgtaaaaacctagatcaatattctagctctaagcagttgtcctgcagatcctgctgcgtggtgggaataaatagggtgcccatagcccagaagtttctttgaaagggtaaaatcaagaaagctaaccaaagccaagccccaagcacccaaatcttagcaagcataactacagccaccagttgtgacgccacgagaggcggctcaggaagccacagctggggaagctgaaggcagggtgaggtctgtgcaagggtggcccaggccctgccctctcccacccaggacactcacccgaggttgaacagcagtgcctccttcaggcccagcagggcggtgcccacggaaaggaggaagatggtagcaccaaagaagatgtgctgtgggcggtagcggctccgcagggagaatgaagctccggggaacaggaagaagctgaagcccaccagccactaggatttgaaaggagacggttccgggacagggcggccggacaccccagcagccgaggtcggccaggcccacacccacgtgcccacgtggcgactgtgagcccctcagccctgcctggtttccttcctcctcagcacagtggtgggaggagcactaagcgcttagggacaagggaccggtcccccaacgcttgaggccttggcacactcagaaagctgggcttgtggccaaaagtgctgagtcagccatggggcgcctgggagctgggcacccttggccgccaatcctagctttgcacccgcacaggcctgggaaggcagctctctcacctgcacacaccccagaaatcaggcccttccatgaggtacatttcagcccagctcccctcctcctcccacctccctggtaggtggccccaggcccggggtgttggaaggactcacctgcacaaagtacaggacaaagacaaggatcccgcaccagctgtgtaggctgtacaggtcagcgtagcccttcttcctgtggtagtcgaacaccgccaccaagcctgggccagagacaggtcatatgaggacagggttggatgtggaaaaggaaggtgtaagatgacccaggggaaccagctagcgggacttctgggctttagtcccagctcgagggctgccagcacctagtggccctgcaggggatgtttggggtgggggcgggcccatcacagctctggggagggaacagagcaggtgaagcggctgtttgccatacctgaagaggcaggcaggtggcggggaaggccgcgcccgggaactcaccaaccagggcgatgacgagcgcaaagatgtgcagcagcccgtgcaggaccttggtggtgcgtttagcttcgttcctgaagacacggtaaaccagcagggctgtgggaggtgagagagggaacgtgagtgcatccgcctgtgcgtgaggcctcctgccccagcagcaaggaggcaccttggtggagaggtgatgtgagctgacggcttgtaacaggagcctagctgcaggaaccggaggagaaagccaggttccctggggaccctgggcagctcctggccttctctgagggcacctagggctgtgtgcaccttaacacccctcccccaccctccaacctcccccagctgtgcacaaagagggcagggccggaggctgcaccacagtccccaccaccaggacaggcagtgaaggcagcgcctctgccctcgtccccacctaaaggagctgcccggcccagcagacgcccccctccacccaccttcttgtcaggtgtcctgcaaattccaggctgtgtttgaggtccactgttggtcacactgaggcaacaagcagcctctgagttcacctgttagccacgtggctcctcacacaggcccccacctaagcctgggcagatggtcctactcctagcaagcaggcgcctggctcccaagcagaaccttgtgatcccagcctgatctcccgcgtccagaagaggtgggcaaggccaggtcacgtgaggaatgcctcttagctttctgctgctcaggaatggctgtcaccaggaccacctctaggaagagcgggtcaaccggatgcagatcccgcttcctggatccctggcctggaggcaggtggaggccaagcactgccttgctcctgccccagggggaggcgctctagctctgccaagtccaagaccaacaacacacatgcgcgcgcacgcacgcacgcatacaaactctcacatatgattactttttttccctcaattcaaaccacccctgcagcagggcctggctcggagcctcattcctttccctctgctgcaagaagtgcccgccttggatgctgtgtgtggaaacgaggtgaaaatgctggaccaggctggagaggagctgccactcaccaacctcagagcctgggtttggattccatctccccaggctctgaaccagcttctgtctctgtcttttctagaatcttagatttgtccaaccagaagagaccgcaggggtgacaagacccctgcaaactgcctctcagggacccccacaagcccgggaaaagaggagcggcccatgggactcaccatttccctgcaggaagatcaggcctatgaccatgcagagggggtgcgcgttgaactgcaggtcgctctcccaggcaatgccgcctcggtacagcccgagccacgcgccggtcatggccaccaaggtcaggcccagcagctgggagaaggccacgtagtaaggcagtgctgtgggggtggctgccgcggccccgccctccatgctgaggcaaacgctgcaagaaagagcagagctcagaggagcagcgcacagcaccccgagatgcgcacagcccccgcggatgcacacagccccccaagatgcgcacaggccccccgagatgtacacacccctcaagatgcgcacagccgcccccggagataagcacggtccccccagatatgcacagccccccccgaaatgcgcacagccgcccctgctagatgcgcgcaacaccccccccgggttgcgcacagccccctccagatgcgcacagccaccccgctagatgggcacagcccccccgagatgcacacagcacccccagatgcgagcagcccccctgagatgcgcatgtcccccccacggatgcgcacagcccctagagactgcgcctgagatgcggcgcggctcctcccacggcggccccgccaccctcccccgaggctcccgctggaagcagcgctcgctctcctacccgcaagccccttcccacccatcgtcctgaggcagaggtctcaagtctcgggagtggctggggggaggggcccagcctccccacggggacaggcgtgacctgggacacgacgccaggagttccatatgcggtgagggtgcaaggaaagataccccaaattctagtgagctcaagggcccagtgcccggctttgttttctgtttcatgaggccctggccttccctgggtgggctttacaggtgagttacacaggcaagcgcgctccttgacgggaaggaaggggctggtcacaccttttctccagacgcgtcatgaagtacatctcgggagaaatgggaagtctccctcccccatcctggtttttaactccatgctggcgatgaggaggcctccccaccccacacccaggagagccagccccgctccccccacgcccccgcccgccccccaccccgctccccgcccggccgcgcctgcagagtagaagtgccccgaccatgctgcacacagggacctgtcagcacacagggacagggcacttcccctccacaccaggggcggggcggacccgcactctagaggggccctcagggaggtttccaaaactgaaggcccccagaaacgaggcctgcgaaggggccgggtagagctcagcacggctgtcccaggtgctcggccccacgtggccctccaggaggaaaggagagcgggtggttcctagcgaagcagcaatgagaaggccccgctaagagcccaagggagtgcccagtgcctgcacagcttcatgccggccggagagcacccagcagctggggatgggaggagaggcggcaggaggagaacaagcggggctctcccctcacccggcagcggcctgtgcgccacggaaaagtgctgccatggcccacagttgccactgcaactgccaccaccatggccaccacaagcagaccccagagcactgctgctgccccccatcccgccccggttccccactggccccttgccacggtccagcctctcctggcagcaactgtatcagaactagggggacagtggccagcacaggggcactgacccccttcacacccggcacacgctctgccctgcagtgcccaggagctggttttcagtccctcccagtgatgggctccttctctgctccccagttctctctgccacatcggacaactgttggcaactccaccattaaagggggggtgtgtgtgtgggccgggtgcgatggctcacacctataatcccagcacctggggaggccaaggcgagtggatcacctgaggccaggagttcaagaccagccacaacatggtgaaaccctatctctactaaaaatataaaaattagccgggcatggtggctcacacctgtaatcccagctacttgggaggctgaggcactagaatcccttgagctcaggaggcagagtttgcagtgggccaagatcgcaccactgcattccagcctgggtgacagaatgagactctgtctcaaaaaaaattttttttaattaaaaaaaaaagggtgtgtgtgtgtgctaataatccacacgcactgcagtagaatatggatcagcaaaaaaggtaaaatgacaggccatcagaatttgatctatatcctcacacaccttcttcctaaaacacatatgcatccttttatagaagcaggatcatttattccattttctaacctgctttttaactgagggcgtagcacacatggatgtttgtgtcaatggatacgcgcccacatcatcattttcgtaacctcacactcttgcattgcacggccattttttagccaactagttcccattgttcagcatttagctagctttcgatttcagttttccaccaaataaacaacaggatgtggtcatctgcaaacttctctgcagggaatcctgaaacaagggctaggttctgttttagacttctgacacattccatcaaatcatctcccagaaacatagctccaatccacattcccagggtggacgggaatacgggattccagaagccccagccaacaataaatcctatttttggaactcctgcctctgtccttatctgtcacctacacgggtatcagttctgtccccgccaccccaaattcaagccccatttctgacggttcactactcatctctacctggacatcccacagacgcttcaaacccagctcgtcccaagtcaccttctctcccatcgtcgccaagttctctcatgccctccccactagctagcagggctgcccttcttccgggcccaggtgacacctcagctcctccacagaaggctgcccaggccgccgcatgctggcacccctcccctcacttccctcctgagcatcctcactgccccacccaagtcagggcctgcagcttctccctcttcaacgtgacagacatgccagggacaaagccagctcccaacatcatgctgtcccctgcgtaagtgcccccgagtgccagtgaaatgccaactgcatggcatgatcctgcccgtttccatctgcagcccccactgttcctgctaggccctctagaggagacgcctgggctcacagaatccaaggacatggcccagcctggctccctgctgtgggcccacacccctgcctccactcctcaggcaccgcggtgcgcagatcactctgtccccaggctctcccggagcctccttaccctcgcggtgccctgtctgctcctcgaaggcagggacgctctcactcctccttgggtatctttgggtctctaataccccgagtctaacaggaaaatgtactgaaagaagtgctgtcccccctggtcacttgttgtctgtcctcctctccaggtcgccgcctcctttattagattcatccccagagagcctggctgcaggcagaatctgattagctacaaattaggaagaacagaggggacatcacctctccctctgctgggtgacccggcaacttcctcacacctcgtggagtacaaagggcaggagaggcccgcagagcgaggggccgctgcccactccttccttcccaccaggctccctggaagacagtggacatcagagccaggctctcttctcgcagcgacgactgcctgcggcttcaacatcctacagtgaaatgcccggcctggcctcccggggagtcggaaccataacattgtttgctccccaccatggcagggcagacgtgtgcttggtgtgtcagtagggtggggacccaacagcctgtgagcacctgctctgtgctgggcacttcatgccatctctaatgtcacccttaaatgacactgtgtggataacaggagcattgccccaatttgacaggccaggaaatggaggctcaaagaggacaagcgacaggcccccaaattcccatcagcaaatagcagctcaactcaacccgcagccacctgcacttggccaggtgctagggccacacagagggggcctggtccctgccctaaaggggcgtgcagatgagctttggtacagacccaattttcaggtaagggtggtacaagttcaagccaggagctaatctgggcctccaagacccgtcccagcatgcacacggaagacggcacccctgctttgatgtctgtgggcaatagcatctctagctctcctgccgaacagtggctgcctgctcgtggctttggcctttccaaggcccaggaactagggtggtgctgtcagtctttccagagactgaggccagcaagggtctgtgttggagctcactgaggaagctgctttgacgcaggggaagctcccgggcggtgccccccctcctgtgccagtcctcctgcgtcctccccgcctcggttccaccatggcactaagcactggtgcgtgcaagacagcaggccctgaccgaaggcaagagggaaggggttacaggagggcaaacaagccgaggaagatgcatttccatttgctcctaaggcgggtgccctggcctaggcagcccaggcacccggggcacctgggcatctgggaggaagccagagatgaacagcggcctctggaatgacagcagcctgcttctgattcaaaggcgaggcttcaaaatctaagtgtaaggatgaaaggaaagcccatggctggcctgcaggcgaccacagtccgtaggttctgagcgtggctctgtgctttacaggagataagcggaagatcccttccgcaacaggactctcgtgaggccattcattggacataattgataacccatttgtgtgcagggaagggctgtcccatgccagaggtgggggtgtacagggatagacattctggtatctctggacagaatctgacccacccacaaatgtgtctgctgcatttgcaaacctggacattgggtgagatttctccctaggaagcaaggctttgaatcgtggccctcatttcccagtcttgacagcaagaatactctctcgctcttccctcctcactgggcagccctgggacaccggctgttcttgggccctctgtgttctcagagcagaactgtgggcagcagcttcaaggcctggaagctgccactccccacccccaagggctccactgccctgcagaccagaaccttgcaaccagagggagctcacgtagcccctcacacagtcacttgccttcctctgtgacagctcaggatgagggtgacagatctctggcagtttctggatcttagagctgtgagagtcaccctcgtccccacccactcaccctacctgcagccagaatccacttaatgcaatcagcgcattagggacagcatgacccgcagatcttcactgagccaagcatcgctctccctcccggtgcccactgcgttttattaaaaggcaaccaagactaatctcattattggggaccagacactgcacatggtgcacagcctcgggggcggaaggcggagcaggggaggctgggaagcgggcagcctgggctggctacagccctccttatcaacagcagagtttgaattgagttaggaaagactgtgactgcggaaaggccgatatctcttcttgatgggtgaaggggaaaacagctcaattgccctagagcgtcctagcatgtgatgaaggagaaagcaaagtgtggtgtgagctattagggtactttcttagcaccccagtagccccaggaagaaggggcttcccaggcagtgctccccatcccatgccagtcctcctgcatcctccccacgcttgtaccagcatggcactaagccctggtgcatgcagagacaccaggccctgaccaaagggtaagagagaaggcattacaggagggtgaacaagccgcaggggctgcatttccatttatcctagggcggctgtcctggcccaggcagcccagggacccggggtatccaggctgcttggaccaggtaccaaggaactaggtacccaggaagcagcagagcctgaagtcaaacactgagctcctttctcccacaagacagagggctcccaatgcttacaaaccaaaatgtttccatttccatgaaaatcagaagaaaaaaatgaacatttagggttgaggaaaatgttgcaattttttaaaacttattttaattaatttttttgttgttgttgttaacagtgtctacctctgtcacccaggctggaatacgatggcatgatcatagctcacagcagcctcgaactcctgggctcgagggatcctcccacctcagcctctcaagtagctggaactacagctatgctgaaatgcccagttaattttttctttttttggagagatagggtctcactatgttgtgcaggctagtctcaaactcctggtctcaagcagtcctcctgccccagcctcccaaagctctgggattacagacagacatgagccagccctaaaatgttttgtttttaaaattaattgtaatccagtctggactatacttgtatttataccaatgcagttgtaaaatataatttttattaatttttttttttttgaggctggagtgcaatggcaagatctcgggtcaccgcaacctctgccttccgggtccaagcaattctcctgcctcagactccccgagtctgggattacaggcgtgctccacgatgcctggctaattttttgtatcttttgtagagacgcgctttcaccactgcgccgggccaattgttattattttttttatggaagacggggcccgtgaaggccagagggccaacggcccatgaaaggcccagcgcagcccaggttagagagatgtgatttcaaaacagactcattatttataaccatcagctcctggacaagccaagtcccttctccaagcctgcttcctaatctataaagtggaggatatctggagctaccttattgaacacagaaggagtaagtggataaaggtgtgccagcgcccagcacagtgcctgccacaaagtaggcattccatcaaagaccaatcttacaaaaacgaaatctggtcctaagagcaccttagaaagagtcacactgctgacacatgaggtttggggccacagagagccagatggcagccgtctctaataaatctacactccattgctgtccaccattagcccctgcacaccaagcagaagctcctggggctggaagaacacaggatggtctgcttttaatctgtgacattgtatattcccaaaattcatttatgaattgttcagacagtagagtgctttttcccagtgaagctacgctttcagagggggttaatttctcattcccctccaccaatgccatctaatgccactgaaccatcccagtattagcaggagcccaagctctgcctgccaaggaaaagtggtgagggcagaaaagtagtaggacaaggctgggcacggtggctcacgtctgtaatcctagcactttgggatgccaaggcgggcagatcacttgaggttaggagttcgagaccagcctggccaacatggtgaaaccccgtctctcctaaaaatgcaaaaattagctgcgtgttgtggcacacacctgtaatcccagctactagggaggctggaacaggagaatcgcttgaacccggaagatggaggttgcagtgagctgatattgccctctgcactccagcctcctggcaacagagcaagactccatctcaaaaaaaaaagaaggaaggaaagtaaggaaagcaagaaagcaataaagcaagaaagaaaaggagtgggacaagcagggtggttccacctccagctctaggaggctccctcatgcaaggaggtggggctgccaccgcctcgtattttcctgcctccatcaaatttcaccgggagaaatccaggcacctagaggaggtggcaaagctttttttttttttttttcattagctattaaaccaaaggggcagaatctaggcgccctagatgtaacttcatttacggagtcagaaaatccacaaaggctgccaaggtggaatgaatgagaggaggacgaccagaaaggagaagtctgggaaggggaccccagatccacacggatgatcctcgctccgtgatacagtcggggacagggcagggagggagggagggagggtggccctgccatctcccaggtgtcaaggtggcggcagctccgccctcagcgcagttggcaccggcctgacccaccacagggccaccgaggccaccgaagccatggggctttcccactcgggaaactcccaccctcgcgctcagaagctgggggcgtcgggagacacaggcggggacctgcggctccacgttgcagcccgggccctgctcggggcaagaggcggtggctccggtttcagatttcaagagggcagccgtggcaaaggctggttggtccatttgcaccctaccttgctctagaacgcggcgcaggagcaaagatccaaactcggggtcaccagcaagcgggggtctcggttctaacttcagcagagacccggcacccgggcaggccagggcaggggccgcctggaccgggagaggctcggctccgagagggcgggcgagccctgcagccctcgggcccagggtgcgggtcggcgccgcagtccagtgcgcggccgcaaggggcaggtgcgaggccggctgctactcgggagccccgcgctgtccctccctgcgcagtcagggctcacctgggccgcccccgccccgcacccctgcgcgctccgctcccacccccagcccggcctcctaccttgcctacccgagcgtcccttcagcctccccgcgccgcgcccgggtcgcttggccggttctgcgggccgtggcgcgacggcgtcgccatggcaaccgggcggcgggctgggcggtgtctccgggaccggaagtggcgtacgcggcccccggggctgccccgcacgtgccaggtccccgcggttgcggccacgctcgggaccgggccctgccagctccgggcccgcacgtgggcgaaccgcggccaccgtgagcccggcctcgcgacctccctccggggcccccatgatcgggggtgcgtgggatctgcggcctgcgggggtggagggccgggagctcccccgggcctgcctcgagggccgcgggattcgtccttgcgagccccgactgcgcacggaaggacctggggtcggccaggcctgggggatgggacgggccccgaggagagcgggtgccaggggcgagacccgccgcccttccccggcttggtcccgcgcttcctgattttctcgctccacgcctcccattctgccctccaccttcttccctgccccgccctcgccctgcccgggcccaggaggccactagatgtcagacccggttcgggccttggccacgccgccgctccgggagccctgggggcacctccccagcccccacgggggagacgatactgccgggaaggcccggactagcccccgcccccgcagagtagccttcggggaacaccgattccaccaggctctcacgaaagccgagagcttgccgtccgcagcttcccctgcccaaagcgcagagaaacgagggcgccgaggccaagaccaagaccgggagccagccccttcggagcccggtccaggcccccggtccaggaagtgctgtgggtagataaggggcccagctcagacttcctacaagctgggaagaaagggttctttcctgtctgatgccgggccagatgtagcaagcgcctaggggtaggagggaaatggggtttcctccccgcagagggaaaccggcctccattcaggaacgccctcccccacctgccctccaggcaccgaggttctgggaggccggggggcagggagacctgcttacttgaatgcgctttgtgtattgcctgtgtattgccacaggcagtgggcaagataggccctggggatccagtactcgcttagtacacagagagcagtctccagcgccaggcgagacgcacaggcgtgtcagctgcatatggcacacggtggcacatggcacaccttccacgagcagacacaaggggccgacacagcagggcccaccccctcagagggaccaagcttaaaccctccaacaacagaaaatttgtagagtatctttcagttggaggaaattaatggataatttaaagtaagaaacagtttccttagcgtgctaacaggcagaatccctgtggattgaaggtggaactgagccatgtcctttgtttggtctgtggatttagacgtggaggaggagtcctgaccggctgagcagggctgagttccctcgtgagagccccgggccttcagccccttccaaagccaggagagactcctgctgaggggtgataggggccctttggcttccccctcaccccacggcccagcagcacggggctgcaggcttttcccttaggaggaagagcagccgcctccctgccagcagtgttctcaagggcctgcttcaagtggggaggggtgggtgagggtgttctgactgagggagaggcctgcacacccgctgcatgggggggctcatggctacacctaacccattttaaagaacaggcaacgccaccaaactgctctctggcactagggcccagaggccttgccccagctcccagatgtcccaacccaggacgacagacacccagactaactaccttgcaaccctgttcctgctgccgaagctcctgccttggaagcctgagaagtgtgcagtccttcagcttgggaaaggtgggaaaggagaggacccctcctgccctttcttgagtggcacaagatgagttccagggcctcctgagttgtgctaacgcctgtaatcccagcactttgggaggccgaggcgggcggatcacctgagatcgggagctagagaccagcctgaccaacgtggagaaaccccatctctactaaaaatacaaaattagccgggcggggtggcacatgcctgtaatcccagctactccggaggctgaggcaagagaatcacttgaacccaggaggcagaggttgtggtgagccaagaccgcgccattacactccagcctggacaacaagagcaaaactccgtctcaaaaaaaaaaaaaaaaaaaaaaggaaatgctgactgtgtttccatgtttccactcccttcccacatcgcagaaccacgctagcctttctgttttcagatgcaccaagttcactcccacctctccatggaatgttctttcctggatcatctctggtcacattctctcaaatctcagctcaaacatcacctcctcaggccttccctgaccatccagagggcagctggggcagggattaggaggtaggagtgctcctggattccgcgtgctgggcagccaggcctagagtgccccctggtctctgacagaaagcatttaaggaggaggaagcatcaaggaagcaggcagaatgtgaatagagagctggagactcaggccgtagacccacctggcacctggctagtcacttctcccttgctagggttaccagattcagaaagaagaggaaaaaataaaaaaaggcttcccagttaaattcaaattcaggccgggtgcggtggctcacacctgtaatcccagcactttgggatgccgaggtgggtggatcacctgaggtcaagagttcgagaccagcctgaccaacaaggtgaaaccccgtctctactaaaaatacaaaaattagctgggcaaggtggcaggcacctgtaatcccagctacttgggaggctgagacaggagaattgcttgaacccaggaggcggaggttgcagtgagccaagattgtgccactgcactccagcctgggcaatggagtgagactccatctcaaaaaaagaaaaccaaaaaaaaattcaaattcagttagttttttcagcatgagcatgtcccaaatattacatgcagtatactaaagatgtattccagctgggtgccatggctcatgcctgtaatcccagcactttgggaggctgaggtgagcggatcacttgaggtcaggagtccaagaccagcctgccaatgaggcaaaaccctgtctctactaaaaacacaacaattagccaggcatggtggtggatgcctgtaatcccagctactggggaggctacgacaggagaatggcatgaacccaagaggtagaggttgaaatgagccaagatcatgccactgcactccagcctggggtgacagagagagaatctgtcttaaaaaaaagatgtattcctcacatgtgagcagatgtcctgtgtttcatctgacaatcctactgctcttgctcgggtgtgggaagggcaggggcccagttctagcccctcccagcaatggcttcctccctcatctctgaaccagttaaccctcattcagtagggacttcaggcagaggccctgaccttgggcagcagaggatacaaagggataagagatggttccccagtcctcagacactataagattcaaatgcacaccattcattcttgggaaagttttatttttgtaccttctctgtgccaggcactaggtgaggtattggggaacagtgaacaagacaggcaccaccctgttctcacaggccttcagtcaggggagctgcacagagatttggggagagcctttgaaactactctgcccaagcccatctctgaccaccttacagagggaaaaccaggattaggtacagggcataggaaggccctcaacccagatgtgagggtcagggaaggcgtattgggtcatgacagaattatcgagccagaagatgctcaggtgttaacccggcagagatagtcagggaggaggcaggagtgtccctggttagaggagcaaggatgatgcaagggaaggctgtagggggctaacctgcaaccctcggggctcccaggcttattttcatgaggatttgccggagccagagtaatagtgcagaactgagccacagcctgcagaatcagcactcaggagccaagccctgtccagctcaggagggggcctgccctgagggacctcacaattgacagacacagcccccgaccccatatcctgcagtggagcagccttaagtccgcaggtatcatcttccgggcctgctccctgaggaacttgaaagtacgaggctactttgatgagcttaaaatagaccaattaatcactcagggaggaaatccatctcccagcttcgggggaggggacaggaaagcagtagccccggcaggacccgtcagagcagccagcagcacagcggccatgtggcagggcacctgcaaggcttccggagccaccgacgaagaccctgagtcacctgcagcctctggagtgtggggggaaggaggctgagggacgtcattgcctgtgagttgtcaccctgcccctggttaaccccaaggctggtcagtctgggaaaaacaagacagacaaaagagccaaataccactggggcaagagggagggagaggccatgacagagaggacagttaagccaccttttttttttttttaagacggagtttcgctctccttgtccaggctggagtgcaatgacagctcactgcaaccgccgcctccgtggttcaagtgatcctcctgcctcagcctcccaagtagctgggattacaggaatgcaccaccacgcctggctaattttgtatttttagtagagacggggtttctccatgttggtcaggctggtctcgaactcccgacctcaggtgatccacccgccttggcctcccaaagtgctgggattaccggcgtgagccactgcacctggcccagttaagccacttagccacttttacctctgctgggcccaagggaatgggacatggggctgataagcagggctggggaccagcttcacaaaggaggtggcacggcagccctgggcgccacaggcaagaggcagccaaaggaatgggcttccccagatgcccagttcattcccaggcagccctctggggaggccgccctttccatgatgattgcctggagccagaggagcagtgcagagcccgggtcacaggctgcacatcagcacgcaggagccaaggatcccatccagaggaggtccattttctctccttcctttcttccaacaaaggcttactggcacctgcttatcctaggccctggagagacagtaacagatcagacacacaaggtgtctgctttcatgtaacttacaagaagtgggtagacagggaattaaaaagtaaactaacgtctgggtgcggtggctcacacctgtaatcccagaactttggcaagccaaggcaggctgatcacttgaggccaggagttccagaccagcctggccaacatggcgaaacccatctccactaaaaaaaatacaaaaagaaaaacaaaaattagccaggcgtggtggtgcatgcctgtagtcctagctactcgagaggctgaagcacgagaattgcttgaacccaagaggaggaggttgcagtgagctgagattgcaccacaatctatatctacatacacacatgcacagaaacctgactgcatgtgttttgaaacacagatgttatgtttcaacctaacaagcagcatgaagaagaggcagaaggggacaaacagggcgtcaggcgagggcaggcacttgttgggggcactaggaaggctctgggagggagaagtgggggcgcaggccacatgaaggtctaggggaggtgactcccatggatggaagagggagggcaaaggcactgagcaggaatgtgtatggtgtctccatcctgccctgccctcctccactcctgtccccatcaaaggggaaagtcgctgagtgtgcagagataggcaggaggagtgccaacaggccatcagagagggcagaggttgaagacgtgaggtgtgtatcagggaccccaccagcaattcctgggatccaggaaccgtccatagacccatggctatagctgtgcctgaccacgtccctcacatgccagcgaacctggacatcaggctgagctcccctcatctggtcctgagggtttgccctgcagccagtgctgtggctgagcggaggcactgcagccccagcattgcattgccctggccgcctctcccctccaggaaggaaatcacgaagaggctgtatccccagagtgtcctccatccccacctccccacttttctccctaagttggtaggtcagtcagtcagctgctctgtgagtgccaggggcagcgaagagcaggaacagccccagctgtctaggacagggaagcaagtgtgcaaggcctggggtaagggatgatcatggccttgggtgatatcagcagagtgaacatactgctgataatgactgatcaccgccaggaacccgccataaatggcagggctgggactcctgcactttgttcaaagcctgtgaggctctgaggtttcacctggctcctgaagctgctccagctctggccacgcaccaagcccctggttctccacccaccttctcatcccaggagagcagtgaggatgtggtggctgttctgagccaaaactgcagggtgatggagccacagcctggaagatgccccaactgggcacactgaacttcgtgactcctccaaggtatcagcaagtcagctgcacaattgtcctgagtgagagatttcacctgaccctgctctgctccctcctctactccatccttatgcttctcttggccctggccattgcctcctgcctgagcatgcctatcaggtcagctgattcttgtcgagagcagattagattcaaagggcacggtgactgtaacccagaggctccctcacccaagaagccacagtcctctaatccctcccagccattgggagaccctcagaggtggcctggagccagaggaatcacacgctcagctggtggcccggttccagctgatctcagcctctggactcatcgcccctctggatcagtcagtgcttccttctcttccagggatcaaggggcggctcctggagcaggggcagggccctcctactcttacagcaaaagtagctcagggcttctgggtgggtttgtctcaaggcctggcctcaaagctctcagacccaaaaatgttctccaaaggtgggttcttaggttccagggcccacagctgttggaaggaggctctaataagtcattacccattccagttctgtgtgtgcccctgcacagcctgggaggtgatgtcaggtccaggtggatgtgactgagtgctctcatctgtctggaggattgttttctccccttccataggcccttcttcagctgataaatccaagcaccccctggggctcacgttggcccagcgctcagtcctggccacttcatgtcactttggggtccaagcccacctgctcctccttgcctggacacagcagcaaatgtgattgccccacaccaggtagctcaggctcctaagctctttagtacccagtgtaaagaccccccatgacacctcccacactgtcccccattgcacccccacagtgcccacgtgccaggtcagcaccagcctcccccagccgaggcccatccagagtcctcttagggtctctcctcagaagcccctggagcctttcccgccagctgaccatcagagagaaggcattgcccccacttctctccttctctgcacatctgtcaacccagccaccctgccctgctcccaagggggacagcacgtgggggcctcagcctggccccagaagtccactgccacattccccacaacatgaggcattttgcctgtgacatctgcatgcaaagctctctcaagaggtgcttcgtttttgttttttgttttttagacatagtctcactgtgtcacccaggctggaatgcagtggtgtgatctcagctcactgcagcctccacctcctgagttcaagcgattctctcacctcagcctcccaagcagctgggattacaggcacatgccaccacacccaactaatttttgtatttttagtagagacagggtttcaccatgttgaccaggctggtcttgaactcctgacctcaggtgatccgcccacctcggcctcccaaactgttgggattacaggcgtgagtcactgcgcctggccaagaggtgcttcttaaagcaaatggctccaagtgagctaaaaactaaatgtcattttctcccctaggaacacctcctatgacccatcattgatgtcttccagtgaatttatttactgaagggctcttgagaagggcttggggggccacgcaggggggcaggaagctgcctggggccagagaccccttcagaggacctggccaggccctagacttctagagctgaagggtggacccaaagatgaatttgcttcttgtgtcctgggtcccctgatagagactgtatgagaagccaacaggaggagggtgcctctccccagccccaggctctcacagccacttggacggcagttgtccctccctccgtccctccccttccctccctcccctccctgtgggtcccccacatttctgtctctgctcccactgcaggctgttttgttcctccctgactctgtcaccctcctctgcttctctgtcacagtctctctcccttccctcagtctctgtccttctgtctgagccgaggttctctgggcttccagaggcagatgatggtctccagctcttcagacagtggctgctttcattccatttcctggcccctgtctgggaacaatgaagaagaatcacgcaggcaccaggtcagtgtcgtggggctttagggccagatcaggcaccccagcccctgagctcccagtggagtcttactagagttgcaaacattttttagtttgccaagtaaggacatttaaaaaaaatagtcccttattctcaccaccgttttacaaaagaagtaataaaatcttaactacaaaaaataaatagaaaggatgtttggaataaaagatattgtgaccaagaaaggaatgctggcaacttggctgatacatctggttgatttcatatctataaatcagtgttgctgtttttgcctctttattgctgactactgaacattttatcactatcagccctgccagggagctggccatcgggaggcactaatagagggacttgtgtggtagagcaaggcctgaggaaatggaggaggcagaggccacgccaggaaggactttgcactcactctcagagtgtggattttatccccaaggtgatgagacaccggggcagggcgctaagtgaacagaagctgtggtcagattggagcatcctcagagccatgtataaaaatggactagctctctccctctccctctccctctccctctccctccctctccctctccctctccccacggtctccctctccctctctccacggtctccctctgatgccgagctgaagctggacggtactgctgcctgattctcctgcctcagcctgccgactgcctgcgattgcaggtgcgcgccgccacacctgactggttttcgtatttttttggtggagacggggttttgctgtgttggccgggctggtctccagctcctaaccgcgagtgatccgccagcctcggcatcctgaggtgccgggattgcagacggagtctcgttcactccgtgctcaatggtgcccaggctggagtgcagtggcgtgatctcggctcgctacaaccttcacctcccagcagcctgccttggcctcccaaagtgccgagattgcagcctctgcccggccgccaccccgtctgggaagtgaggagcgtctctgcccagccgcccatcgtctgggacgtgaggagcgtctctgcctggccgccatcccatctaggaagtgaggagcgcctcttccctgcagccatcccatctgggaagtgaggagcgtctctgcccggccgcccatcgtctgagatgtggggagcacctctgccctgccgccccgtccgggatgtgaggagcgtctctgcccggccgccccctctgagaagtgaggagaccctccgcccggcaaccgccccgtctgagaagtgaggagcccatccgtccagaagccaccccgtctgggaagtgaggagcgtctctgcccggcagccacctcgtccggcagggaggtgggggggtcagccccccgcccggccagcctccccgtccgggagggaggtggggcgatcagccccctgcccggccagccgccccgtccgggaggtgaggggcgcctctgcccggccgcccctactgggaagtgaggagcccctctgcccggccagccgctccgtccaggagggaggtgggggggtcagccccccgcccggccagctgccccgtccgggagggaggtgtgggggtcagccccccgcccagccagccgccccgtccgggagggaggtgggggggtcagccccccgcccggccagcctccccgtccgggagggaggtggggggatcagccccctgcccggccagccgccctgtccgggaggtgaggggcgcctctgcccggccgcccctactgggaagtgaggagcccctctgcctggccggccgccccgtccgggagggaggtgggggggtcagccccccgcccggccagccgccccgtccgggaggtgaggggcgcctctgcccggccgcccctactgggaagtgaggagcccctctgcccggccaccacccggtctgggaggtgtacccaacagctcattgagaacgggccatgatgacaatggcggttttgtggaatagaaaggggggaagggtggggaaaagattgagaaatcggatggttgccgtgtctgtgtagaaagaggtagacgtgggagacttttcattttgttctgtactaagaaaaattcttctgccttgggatcctgttgatctgtgaccttacccccaaccctgtgctctctgaaacatgtgctgtatccactcagggttgaatggattaagggcggtgcaagatgtgctttgttaaacagatgcttgaaggcagcatgctccttaagagtcatcaccactccctaatctcaagtacccagggacacaaacactgcggaaggccacagggtcctctgcctaggaaaaccagagacctttgttcacttgtttatctgctgaccttccctccactattgtcctgtgaccctgccaaatccccctctgcgagaaacacccaagaatgatcaattaaaaaaaaaaaaaatggactaggggcagggcacagtggctcacgcctgtaatcccagcactttggcaggctgaggcaggtggatcacctgaggtcgggagttcgagaccagcctgaccaacatggagaaaccccacctctactaaaaatacaaaattagccgggtgtggtggtgcatgcctgtaatcccagctacttgggaggctgaggcaggaaaatcgcttgaacctgggaggcagaggttgcagtgagctgagatcgcgccattgcactccagcttgggcaacaagagcaaaactccgtctcaaaatagaataaataaatggactagggagagggactggggggacgagaagagggggcccagtgggaaatgatgagggtctgtactcaggtggggagagtggcagcagggctggagaagaggggtgttgaggaggacttgaggagctgggcagcaaaggaccagaccagaggggccacccagagctggcgagaggtgtcatccctgtccacattcccatagggacagcagcggagggatctttgatttcactagaggcagaaccaggaaaagtaggtttaagatttgggattaggccaggcatggtggctcatgcctgtaatgccagcactttgggaggctgaggcaggcagatcatttgaggtcaggagttcataaccagcctggccaacatggtgaaaccccgtctcaacaaaaaatacaaaaattagccgggcttggtggtgcgcacctgtagtcccagctactagggaggatgaggcaggagaatcacttgaacccaggaggcagaggttgcagtgagctgagattgcaccacagcactccagcctggacgacagagcaagactctgtcaaaacaaaacaaaacaaacacaataaaagatttgggattaaaggattggaggaacatcctggctccacagaatgtgacacttgataccatccagccagagtagcccagggcttcacgcagtctgtgggatggagaaggagggacagctggtggctcctggtggggacacgtgtcccgttttgcctccatttgttgggtgaccttagtccacctaccaaccactttgtgccttggtttccttatctgaaaaatgggaatcaaatggtacctaactcacagggttgctaggaggtttcacttctctgtgtaaagcactaagatgcctggctcagtagacacggcctcatgttgccatttcacacgccagcgcccacgcagcacccaggcagcaccagctaatggagggcagttaacgttggtgatgtgggggcaggaggcacgatcttggcaaataccaggcctggcttcaaaggaaggcccaggttcggggccaccttctgggcttgggcttaggtgcaattttttttttttttttttgagatggagtcttgctctttttccccaggctcgagtgcaatggtgcaatcttgctcactgcaacttttgcctcccgggttcaagttattctcctgcctcagcctccaagtagctgggattacaggcacacaccaccacacccagctaatttttgtatttttagtagagacggggtttctccatgttggccaggctggccttgagctcctgacctcaggtgatccgcctacctcagcctcccaaagtactgggattacaggcgtgagccatcatgcccggccttgggtgctattttgaacccctttgatgccctgtgagcagctctcacttgccactcacccaatgcctggggggcagggaggtcgacgcttcatggagatttccataggatggatgcctggtccagcagggtcccaatgggcaggggcagaggcaggcagaggaaagggtcacaaatctcatagccctagaagggagtgagaagaggaactggcgggcacagccactcacatcatagcagaggacctgcaccgtcaaagccaaactagcagcatgtccaagacccaaatccttcatctgcttaccctccttcccacctcccccaaaactgtttctagcatgtccccctccccatagaaggcatcatcaccccctccactcttcaccccccccccaaagccagccagtccacagctatccctttcggtcccacctgcagccagcccctaaacctaccactgccctcagtcgtggggtctcttccttcctggtggtgacagggccttctgagtttgctaagcacagatctacactgcatcaaagagatcagagaggtgactgggaaaggcagatttggtcatggtcctccccagctaaaaacctgttgccctcaggaggaagtctgagcccgccttagctccatggcctcagcttctgcagtctccgtatcatccacagctcacagcctcctgccgatcagtcagcacgtctttccagaccttctgcttgaaatgcgagtcttctaacaacttgcctgctgaactcctactcctcctttcagggctcagcttaagcatcgcctgtggccagggctcagggcctgccctgcacctttcatatcgcctctctgggagtggcttgtttaaacatcccgggagcctggagaggtggtatcacaggcatttgaaccagagcgactccatcttgagtgagggctaggaaaatgaagttgggacttgcattcccagaaggctattcccagcctctagatgtttacagttaaggaaatggattaataatgtttactaacaaacccaaacttcggagtgtccagatatcccgatatctcgagaacaaaggcattcctaattttgcttcaaagataataatattgattcttgcaaaatttggtaattttaaaaaagaatcctttatcacaaaccctgtagcagagcacatctccccatgatctttttttatcctatatatatacaagcactgtacctagggtggatgcattcctcctcttacttttgggaatgccctattctgtctatggagtagctgttctttcaccacttgactttctaaataaacttgcttttcctttgcaccgcagactcgccctgaattctttcttgagcaagatccaagatccctctcttggggtctggatcgggacccctttcctataacagtgcgaccaggctgtccctgctcaccaaggtgtctgggcacggtcggtgactgctctttgtaggtctcggtgaaaacctgcggaggaatgagtgagtgtaagaaagggaaggagacatttttaattaagaccaggcaagattaggcaataggagaaaagacagatatgagtcaaagcttactcacatgttcctggcctgggaggcagagatagattgtcactgtccgcagccacggcagagctgggctgtatcctgggcctgaaatgaagaggtacctccctctcctcccctgcttcctgggattctgggcctgacatcctatagcagggtacactggagacagggccagatgagttgccacactgcattgtccctggcatgtcaccattttttgtaatttattgttttttactgtggtgaaatacacctaacagccgggcacagtggcttacacctgtaatcccagcactttgggaggctgaggcaggcagatcactggaggttcggagttcaagaccaacctggtcaacatggtgaaaccccatctctactaaaaatacaaaaattagccaggcatggtgatgggcacatgtaatcccagctacttgggaggctgaggcacgagaatcgcttgaacccgggaggtggaggttgcaatgagctgagatcgcaccactgcactccagcctggtgacaaagctagactccatctcaaaaaaaaaacaaaacaaaacaaaacaacatcttgcttagtaagtttgtgcttgaccgaaaactgaggggaagagctaaaatgagacgtgagagttaagatgggattgctgagtgagtcaaaagaaattaagattgaacttgacagtcagcatttaaaagagagaagtcagatgcacatcgacaaactggccatctttcatacggaaaagatctgagggtttgcactgactctcagtttcttttctctttttttgagacggagtctcgctctgtcgcccaggctggagtgcagtggctccatctccgctcactgcaagctccgcctcctgggttcacgccattctcttgcctcagcctctcgagtagctgggactaggactacaggcgcccgccactacgcccggctaatttttgtatttttagtagagacagggtttcaccgtgttagccaggatggtctcgatctcctgacctcgtgatctgccagcctcggcctcccaaagtgctgggattacaggcgtgagccaccgcgcccggcctgactctcagtttctatatgagctgcagcaggtgaggaggctgccagaacaacctcagccctcttcggctgcaccaagggaaggaattgcattaagtggaccagggctccctctgcgcatgttaggccagcccacaggctttacttaaatacaggcagcatagtttaggagagatgtggaaaatctgcagtccatccatgagaagatgacagagcatcaggatacagagaacttctctccccgggaatcactgaaggcactgtgtttctcctggagaaaaggagacatgcttagacatggttgtggccgggtgtggtggctcatgcctataatcccagcactttgggaggccaaggcgggcagatcaccaggtcaggagatcaagaccatcctggctaacacagtaaaacctcatctccagtaaaaatacaaaaaattagccgggcgtggtggcgggcgcctgtagtcccagctactctggaggctgaggcaggagaatggtgtgaacctgggaggcagagcttacagtgagccgagattgcgccactgcactccagcccgggtgacagagtgagactccgtctcaaaaaaaaaaaaaaaagacatggggttgctacctctcatcttggacagtggccatgtcaaagagaaaagactcattgtttctctagaaagcacagtgaaaaacaataagcctggcctggggcggtggctcatgcctgtaataataagcctggcctggggcagtggctcatgcctgtaatcccagcactttgggaggccgaggtgggtggatcacctgaggtcaggagttcaagaccagcctggccaacatagtgaaaccccgtctctactaaaaatataaaaattagccaggcttggtggcgcatgcctataatcccaggtacttgggaggctgagacaggagaattgcttgaacccaggaggcggaggttgcagtaagctgagattgcaccactgcactccagcctggccgacacagcgagactctgtctcaaaaaaaaaaagagaaaaaaaagaaaaagaaaaacaataaacctaaagaagaggcaggagacacatttagcataacaaagcaatttctaacaaccacagtggctcagcccacagaagtagtgagcttctgtccttgaaaacgttcggatgtggacaggatgatgtcgaggataccagagacattactggccagagagcagcgtttcccgattgttttccccttccaagcatcccattcttaaagaatctcattttttgaaatttaaaattaactttaaataaatttcacttattaaaagtagtgattatcccattttatctttattttattttattttatttatttatttattttttgagagggagtcttgctctgtcacccaggctggagtgcagtggcatgatctccgcttactgcaacctccgtctcctgggttcaagtgattctcctgcctcagcctcccgagtagctgagattacaggagcccgccaccacacccagctaatttttgtacttttagtaaagatggggttttgccaagttggccaggctagtattgaattcctgacctcaagtgatccacttgcctcggcttcccaaagtgctgggattacaggcatgagccatcgcgcccagcctaattgtcccatttgagtaatgaaaaacctatatactatcaatcatccgatgctcagcttggggttcactgaatagaagaagtgactcagccttgggggtctggaagagcttctgagaagcagaggttgtgccagagtggggtttgaggaatgacttgggggttctacaagcagacaaaagagggtctttgcagcagagagactcagaggtgaaaacatcagctctggaataaactactgagtataaagtgggactgagaggaggctggaagcagcagggtgcagattaaaaaaggcttgtcggtttgatgagggccgtgcgggagctttgcccaggaaaacagcatgagtgaagaggagctggccaaaaaagaaaaaagagatagaatccaactgcattcaaagtaagacctcctgtttatcaaaagacacccccccaccaccaccaaagaaattcatgcaagtcacagactggaaatgatatctgtaacacatttaaatgacaaaggattaatatcaagaatatataaagaactcttaagaatcagtatggaaaagaaaagaaatgggcaaagaacacaaacaggaatatcacagaggagaaagcacacatgtcctgtaaacatatgcaaagatatttaacctcatcagcaacaaggtaatgaaaatgtcatgcccctcaaattggcaaaaattaaaaaattggacagtagtaagtgttggtgaagctatggagcaatgtgggaactcttatccactgttggtgggagtgcaaatcagtgcaactattttgaaagcaatttgacatctggatacccttgaacttttgcatacctttgaacacctgcacagccttggcccagtgactttactcccagtgtattccctacagcagtacttctctcaaactgtggtggaggacctgtcttgtttctgtgttaatttccagtttgtttggggaataatccttcttgtaaaatacaataaaaatgaaccactaaaaaatggaatgaaaaaaaggcatacaatttacaagccctgatatcttgctattagattcaacagatataaaattgcttatgtataccaaggggacatgtacaaaatgttcctggcaaatcattttgtaatagcaaaaaacaaaaagtaactcaaatgtccattgacaggagatcagagaaataaattgtgacataatcacgtgacaaactatagaattgtgaaaataaatgaactacagctctatgcaacgacaaaaaaagtctcagaaacataattgagagaaagaagtttctatcgccccaaaaataaacctcaaccctattttcagttacttctccttcttcttacccccagccccaggcaatcactcatctacttccgtctctatagagttgacttttctagacatttcctatacatggaatcttacaatatgtagtcttttgggtctggcttctttcacttagcaccctgttttgggggtttcaccctttgttgtgggatatattagagccttattcctttgtattgccaaataaccacctatgtcgatatgccacattttgttcatccattcaccagctgatgacatttgagtggcttccacttctccgcaagtttgaaggatgctgccttgggtgtaggtctttgcactgatgtgttttcatttcccttgaattcaaacgcaggtggtattgttattataaagctctacaacaagaaaaattcattagtatgatgtttagagatacatataaagtactgaaacttttttttttttttttttttgagacggagttttgctcttattgcccaggctggagtgcaatggtgtgatctcggctcaccgcagcctccgcctcccaggtttcaagcgattctcctgcctcagcctcctgagtagctggaattacaggcatgaaccaccatacctggctaattttgtatttttagtagagacggggtttctccatgttggtcaagctggtcttgaactcccgacctcaggtgatccacctgcctcggcctcccaaagtgctgggattacaggagtgatctaccaggcctggccagtactgaaacttttttaagggaataataacagcattcagggccagacacgatggctcacacctgtaatctccgcactttgggaagctgaggtggtggatcacctgaggttgggagtttgaaaccagcctcaccaacatggcgaaacccggtctctactaaaaaatacaaaaattaggctgggtgcggtggctcatgcctgtaatcccagcactttgggaggctgaggtgggcagatcacaaggtcaggagattgagaccatctggctaacacggtgaaaaccatctctactaaaaacacgaaaaattagcctggcatggtggcgggcacctgtactcccagctacttgggaggctgagtcaggagaatggcatgaacccaggaggcagagcttgcagtgagccaagatcgcgccactgcactccagcctgggcgacagagcgagactccgtctcaaaaaatgtataataataataacaataatacaaaaattagccaggcatggtggcaggcacctgtaattccagctactccagaggctgaggcagggaaaattgcttgaacctgggaggcagaggttgcagtgagttgagatcgtgccacttcactccagcctgggcgacacagtgagactccatctcaaaaaacaaaacaaaaccaaaagaaaagacacgaaaaaaccagcattcaggggagtagatgaggagcatgggggtgggaagagaaggatgaagctggaggcaagggtgatggctggtgggtttatgggtgctcgcttcgtattatgctccataacttacatatatattttattagatatcatgtttatgtatatatgctacataataagaaggcaaggccgggtttggtggctcacacctgtaatcccagcactttgggaggccaaggtgggtggattactagagatcaggagttcaagaccagcctggccaacatggggagacccccgtcttggaggtgagaatggtttgtttagactctagactagcactgtctagtggaccgttcggttatgatgtgtattagtctgttttctcactgctatgaagaaccaccttagacagggtaatttataaaaagaggtttagactgggtgtggtggctcacgcctgtaatcccagcactttgggaggccgaggagggcgcatcacctgagatgccaatacaaaaattagccgggcgtggtggtgcacgcctgtagtcccagctactccggagggtgaggcacgagaatcgcctgaacccaggaggcggaggttgcagcgagacgagattgcgccactgcactccaggctgggcgacagagcaagactccatctcaaaataataataataataataaggcattttaaaaaatgaaagcctgtctccaacgccctaacaaccaaggtttctactgcagcgacagtgtgaccactgcactaactcctacagggctctcaaaggcccaggcactgcaacgggtgccggtgcctggcctgaaaatcccagtcccagagatctgcgggggtcctccatgcttccccgggggccttgcttcccaccgaccacccttagaacaaacagcccatctgtgcacccttctccctcctctccctgaccccctcgcctggtgtactcttccacgaagcagcatcatcccggattcacatttatttgttgtctgttgccacccagatgcgtgtgcagaatatggctctatgggagctggaccctggctgggtcatggcccaagccccgacgtgcacatgcctggcggcaagggggctcaggaaatactgcagagttaacagaagcagccgggggcctgtgatgtggatggagagaactggggctatcaacctgagctgctctcttgacagctgaaagcataggctatgttgctgtttttaccctgggtagacacgcctctggtaaatgtatgatttgttagatattttgaggtctggaaaacagtcatcagaccctcataagcaccttcaaggactctgatatggtttggccatggccccattcaaatctcatcttgaattgtagttcccataagccccacgtatcatgggagggacccagtgggaggtaattgaatcatgggggcaggtttttaccatgctgttctcatgatagtaagtctcaagagatctgatggttttttttttttttttagatggagtcttgctctgtcgcccaggctggagtgcagtggcgccatctcggctgactgcaagctctgcctccttggtttatgccattctcctcagcctcagcctcctgagtagctgggattacaggtgcctgccaccacatctggctaattctttgtatttttagtagagacggtttcaccatgttattcaggatggtcttgatctcctgacctcatgatccacccatctcagcctcccaaagtgctgggattacaggcgtcagccaccgcgcctggcccaatctgatggttttataaagggcagttcccctgcatacactctcttgcctgctgccatgtaagacatgcctttgctcgtccctcaccttccaccatgattgtgaggcctccccagccatgtggaactgtgagctcattaaacctttttttctttatgaattacccagtctcaggtatttcctcatagcagtatgaaaacggactaatacagacccctaggggtccaggatcccagctggaggtaaccattcctaggtgagccttaaagtactttgcaaagttaggattccgcatttccacggcagggtgacctcctggggtctagggctcttcatcaccctcattggcatcatcaccgtcataatccagaccccagacagatgtgtctgaaggcagttgggtgtgagccaggagcccagcggggactgggctggaggtgtgaatagagaaactgccttcagcttcagcctcaaaacctaccacaggatcttaaccccaggtctgcactgagcagccagcactagtggctacttaacgtctgaaatacggccagtgtgacttaggaactaaattttaattttacttaacttttattttgagacaaggtctcattctgtcacccaggctgggtgcagtggtgcaatctcagctcactgcaacctatgactcccaggctcaaataattctcccatctcagtctcccgagtagctggaactacagacacccaccatcacacccagctaattttagtatttttttgatagagacaggtttcaccatgttggccaggctggtctcgaactcccgacctcaagtgatctgccagccttgatctcccaaagtgctgggattacaggtgtgagccactgcgcctggtcttaattttaattaatataaaattttaaaatggaagcagtgtaaatgtttttatattaaacacaactttattgctatagtaagactacatttcactctgttgaaaattgagcctctgaattgagatgtgtaaaatacacaccagattttaagacttggcacatacaagaaggtaaaatatctcattaataatttttgagctgtgtgtggggtggctgcacccttgtagtcccagttacgcaggaggctgaggtgggaggatcactggagcccagaagttggaagctacaatgagctgtgatcacaccactgcactccagcatgggcgacagggaaagaccccatctcttaaaaaagggggtggaggggttaaagaaataataattttgatattgattacatgttaaaaatggtactattttggatatattgggttaaataaaatatattaaaatgaatattacacctttttcactttttctaatatggctactagaaaatataaaattatatatgcagctctcattatatttatgttagacagacatttccatcatgatatggcttggctttgtgtccccactcaaatctcatctcaaattgtaatccccacgtgtagagggagggatctggtgggaagtaattgaatcatgggggcggacttccccttgctgttcttgtgatagtgagggagttctcacgagatccaatggttgtttttttgtttgtttgttttctgttttttgtttttttttttttttgagacagagtttcactcgtttcccaggctggagtgcaatggcacaatctcggctcactgcaacctccgcctcccgggttcaagtgattttcctgcctcagtctcccgaatagctagggttacaggtgcgccaccacacccggctaattttttgtatttttagtagagacagggtttcaccatgttggccaggctggtctcgaactcctgacctcaggtgatctgccctccttggcctcccaaagtgctgggattacaggtgtgagccatcgcaccaggtctaaacctcttttctttataaattaccctgtctaagatggttcttcgtagcagtgagaaaacagactaatacacatcgtaaccgaaaggtccactagacagcgctggtctagagtctaaacaaaccattctcacctccaagcaacccggttcctcccacatccacttttgatttaagctccctgcctgggggccctaaccctctgattctctgaagctaagccctgccttcctccatgtgaagctgtcttgcctgtcctttcctgctggtaggaaccatcttcctcccttaatatccactatttataccagacttcagcacttaggcttggagaactaatttcctcttcagctcaatttttacattaaaggcagttaatacccttctctcttaattgagcgccttgcatataaggaatggtaactgatgattctaacagtattaatagcacctttttttctgtggtgctttacagctcaaaaaggatctgtcatctccccacaaccttaagagggaagacaggtagagattttcatagccattgtacacatgaggaaactgaggctctttgaggttattttgcacagatcataaggcttgttaatgtggcccccatttttccactgtaggccagtgctgtttcccctccatgtgcttttggtgcccacgtgaaaatgcagacagttaaaactgaatatagagctgggcgcggtggctcacgcctgtaatcccagcactttgggaggccgaggcgggcggatcacgaggtcaggagatcaagaccatcccggctaacacgatgaaaccccatctctactaaaaatacaaaaaattagccgggcgtagtggcgggcgcctgtagtcccagctactcgggaggctgaggcaggagaatggcgtgaacccgggaggcggagcttgcagtgagccgagatcacaccactgcactccagcctgggcgacagagccagactctgtctcaaaaaaaaaaacaaaaaaactgaatatagaaagaaaagactagcatggttggggaaactagggctgcttcgtgttagaggcaagacttgaactgaactttgaggaatgggcaagctttggccaaacaaagaggagtatgcggacttttggggacagaaccacagcttctgtgaaaaccaatccataaacagaattcttgattaacaaagaatgatggaattaaacatttggactttttttttaaaacaacagttttatcaagatatagttcatataccataaaatccccccttttaaagtatacaactgagtggcttttagaatattcagagttgtacaaccatcactactaatgtcagaacatttcactacccctaaaagaaaccccataccacagattccgatgccgccgggagccctgccatgccatgtcacatatattatagtatatctatgcccagccatggtcaacccaccgtgttctttgacatcaccatcaacagcaagcccttgggccacgtctccttcaagctgtttgcagacaagtttccaaagacggcagaaaactttcctgctctgagcactggagagaaagggtttggttataagagttcctgctttcacagaattattccagggtttatgtgtcagggtggtgacttcacacaccataatggcactggtgtcaagtccatctatggggagaaatttgatgatgagaacttcattctgaagcatacaggtcctggcatcttttccatggcaaatgctggacccaacacaaatggttcccagttttgcaactgcactgccaagactgcgtggttggatggcatgcatgtggtccttggcaaagtgaaagaaggcatgaatattgcggaggctatggagcgctttgggtccaggaatggcaagaccagcaagaagatcaccattgccgactgtggacaactctactaagtttgacttgtgttttatcttaaccaccagatcattccttttgtagctcaggagagcaccctccacctcatttgctcacagtagcctctaatctttgtgctatctctcagttccctttgggttccatgtttgccttattctcctccatgcctagctggatttcagagttaagtttatgattatgagataaaaactaaataacaattgcaaaaaaataaaataaaaagaaagaagaggctgggagcggtggctcactcctctaatcccagcactttgggaggccgaggtgggcctaccaaaggtcaggagatcgagaccaccctggctaacacggtgaaatcccatgtctactaaaaatacaaaaaaaattagccaggcgtcgtggcgtgcacctgcggtcccagctactcggaaggctgaggcagaggaatggcgtgaacccaggaggtggagcttgcagtgagccgagatcgcaccactgcactccagcctgggcaacagagcaagactctatctcaaaaaaaaaaaaaaaaaaaaaaaagacggaaaaggcattatatatttgtgaagacatggacagaaatgtgtcctgattgtggtgccacaaagcactgagcctactagaagacgtcagcaaaagatcccctgaaaagtgactccaagccattcactgcaagggatggttacacagatgcagaatacagaaggtcaatagtagcttaatgctacatcacagcttaacactacatcatccacctcacttcatctcaccccatcgtatcgtgtcactgtgctcaccatcacaagaacagggaggatagcacaggaagatattctgacagagaaagagagagaccacatttacataacttttattacagtatattgttataattgttctattttattattagttattgctaatctcttactgcacctaatttataaattaaaccttgttattggtatgtatgtataggaaaaaatatagtgtatatagggcttggtactttcttcaatttcaggcatccattgagagtcttggaatgtacccactgaggataagggggggctgctgtacatactttgcaaatatcttctctcatcccatgggttgtcttttcattttctttctttttttttttgagacggagttttgctcttgttgcccaggctggagtgcagtggcacaatctcggctcaccacaatctctgcctcccgggttcaagcgattctcctgcctcagcctcccgagtagctgggattacaggcatgaaccaccacgcctggctaatttttgtatttttagtagagatggggtttctccatattggccagcctggtctcgaactcccgacctcaggcgatctacccacctcggcctcccaaagtgctgggattacaggtgtgagccactgtgcctggccgtcttttcattttcttgatggtgtcattgaagcacaaaagttttaaattttgatgaagaccaatttatctgttttttctttcatcacttatgcttttggtgtcatatctaagaaaccattgactaatccaaggtcacaaagatttattgcctatgttttcttctaaaagttttatgattttagttcttacatcaaggtctattttaagtcttttgttttgttttttgttttttgttttgagacagggtcttactctgtcacccaggctggagtgcagaggcacaatcatggctcactgcagcctcaacctcttggcctcaagcaatcctcccacttcagcctcccaagtagctggtattatagacatgcgcaaccatgcccagctaatttttttgtagagatagggtttcaccatattgcccagactggtctcaaactcctaagctccagtgatccgcccacctcagcttcccaaagttctgggattataggcatgagccactgcacccagccccaaattttgtatatggtattagaaaggggtccaacttcattcttttacatgtggaaatccaattgccccagcaccatttgttaaaaatattttctttcccatttaattgtcctagtgttcttgtcaaaaacaattgaacataattgtatgggttcatttctggactctcaattctattccattgttgagcatatttttaagggctgtttttctctcctgtggtaactggtgacctgtacttcctggaagagagatgaaaagattcccaagccaactgagttacctcacgtgggtcaggtctctgtggctctctgcactggcctattcataatgatatcctcctgcaggatttgagccttctcctttgttgtgacggcagccgaggaggtggctgactgcccagacagccttatctctttcctacctttcaaggttattgtaaataccaaattagattgtttatacacaagaatttagcactaaagcactatacaaatgtaagctatttatttctatttatccttctccttcatgaataagaccctaaaaatagaagatatttttaatttttactcactgggctcaaggttgcagtgtctgtattattgcaaattccaaattaatgaagtctggctcttcttatattattcctgcaaaaggctgtgtgctcaccccccggagtgtgaatacgagtgtgggtcatttcctctttcctctgcacccttccttcgatgaggttttgccctgtgctaggcaccatgctaaactctgagaaaaccacagagaacaaggcagacgccatccctgccctccagtaacatacaatttagtgatgaagctgggggatttaacaagccattctaataaagcgttacagtgagggaggtgcagggtgatgcctccagcagccctggtgtcagctgctccaggtccaggggaagacttccattatcttccaaccctgtcggaagtggaggcggaggctgtttattgctgacacagtccctaacccagggtctatagacattgtggaaatgccttggagtcagacgggagaatgaaccagcagaagcaatgcccgccctccaccctcctgaagagggttctcaggaactctttggaggcgaggccagcctctggctgagggcctctggatacaggttaggcctcaggctcttctcctctctactcatctctcctcccttggcccctccttcagaggctgacagagccccactctcatctcttccccacccaagcctctttccacagaaagactgcttcctcccaggagacagcagctcatttgcacacagacacccacagccctcaaagcctggaaggccaagctgttaggacccctgagagcagggtggctcctgggaggagagcccaggccaccaccttgccctccctggcccctggccttcgatggggctgctctgatcacaaacgtccaccaacgtagccggcccagaagtgcacccatgtcctctggtatccactggctctccaagccaaactgggcagggaggagttgtgagggaaaactgcaggtcaggagggaggctggcaaagcgggccagggccaggcctgaccccagctctcctctcccggccccactgccggccagtgtttaacaaggccctgccttctccctctagtgctagggacagccaccttcttcctctccccaccgccccctctcccctgcaacacgtcatctgacaagtcagtgcgatctcactggaggtgcatctcacaggaacgcggggtcacagcctcctgcacacactccatgctgcacagcaaggtgcacgtgtccctcagagccccagacaccatcccccactcacccagaagcccaagtgattcccaacagcccccagcagcctaatgggttggggtcttgggagcagctgtccctggctccttccctgatcccaccgcccagcctcaccccacggttcctccattgccccacctcccactgcgccgccgggcctctgccagggtcaaggggcttcccccctctggcagcagacgccatggtgccgaggtggcctccacaaccgccctgtgcgccaataggacaagactgtcctccctcccccacacttgtcactttgagggacacgtggatgagacaggaaaacacaggggagtgtggagacctgaggtgacttggagcaagcctctcaacctgagcggcaatttcttcatctgtaaaatgagggggttgttctcatctctgaggctttgtgtcgctctcaaagcctgctagcctcgggttctaggactctgttgggatcgtgtgtgatgttttctgctgagcgactggcagcctgtgtcctcggggggaaagagggcaggcgctccaaagctcctgcgctctgtggctccccctccctcgcagccccaagccccaggtgtgccggccgccctgagcccctccagcacctcccggaggcgcctgcaagacacctaaggtccccgcctccctcctctcccccccgccacacccctacccccggcaggcgacgtccccgcccctcgaccatggcctggtgaagaagccggccaggcccgatcagccccatccccgccgcacgagcggcgcctgcggacagctcctggggccccggccttgtcactccggaggcgggaggctccggggggtcgggctgggaagatcgagccggaggccgctaggctcccaggccccggccgaggctgcgcggccgcacggtgggcaggctcgggtgttccggcaaactgccgggtccccatcttctaaagagaggaggccctttctccagcttcctctgcgggagcccgacccagccccatcccgccacccccgggctgcacctcggcccctccccggcccgcgcccctgcccggggcgggccaggaacctcggcccgcgccgctggggactctggagcggaggaggaagcgcggcggggcgggggcgggggtgtgtcgggttttataacccgcagggcggccgcggcgcaggagaaggggcagagccgagcaccgcgcaccgcgtcatgggggccgcctcgggccgccgggggccggggctgctgctgccgctgccgctgctgttgctgctgccgccgcagcccgccctggcgttggaccccgggctgcagcccggcaacttttctgctgacgaggccggggcgcagctcttcgcgcagagctacaactccagcgccgaacaggtgctgttccagagcgtggccgccagctgggcgcacgacaccaacatcaccgcggagaatgcaaggcgccaggtgggcgcccgggcccgggcgggggcggggcggggccgcggcggccaatcacagcacgcggccggcttgtggggcgggcaggctggcgcccccgacccgaaccccaccccgaccccggaccctcgccccgacagtcagccgcggggcccgagcgccgggctgcgcgcacggcctgcgctcccagcatgcacgagttggatggatgagggtggctgctcccaggccgcgcccgccttcgccgaaggtgctgggcttggctctggggcccccgcgctctcgggcagctgccttctcacctccggacgctgtcgctgtcaccgtcaccgcactgcactgtccatccaccctccactcgcccggcctcttttctggtcccaatttctgctccaccattcccatgaggcagattccctccagaaggaggaagcgcggcttccgcaaactaaggtctcccgcagggatctccccagggcccgggctctggaagcccttggccttcctcccctcccccagcaccgtggcttctcctttatggcctgcatctaagcagggtcctacaccctccctgccctcctggtgcccaataggaggaagcagccctgctcagccaggagtttgcggaggcctggggccagaaggccaaggagctgtatgaaccgatctggcagaacttcacggacccgcagctgcgcaggatcatcggagctgtgcgcaccctgggctctgccaacctgcccctggctaagcggcagcaggtgggctgagggctgaggcagagctcgggggcggcctcctagtgccccatcgtgggggtcgggggagagcagcccatcagggagggaggaaccctgggatccacatgggccctgacagaagggaaagcccaggtaagcacagaatggctttctgagcattgatttttcttggagatggggtggggagttactttctgttaaaggaagcattctggagtaggaagccaaattcaaatacacttctccctaggctggtttatgagcttctttggaagagttgagaagggctgggcgtggtggctcaagcctgtaatcccagcactttgggaggctgaggtgggcgcatcgcttgagcccaggagttcaagaccagcctggccaacatggcaaaacctcgtctctacaaaaaaaaaatagctgggcttggtggtgcgtgcacctacagtcccagctactcttgaaactgagggggaaggatcacctgagcccaggaggtcaaggctacagtgagctgtgattgcactactgcaccccagcctgcgtgacagagtgagacctccccccaaaaaaaagagagagagaaaaggttgagaaagactgggaagtcaccaaagccagagaatgggagggatctgccctcactgcagggtggtgccaagctgggacttgaccctgaccctgactttcaggactcctgtcccccactccacaggctgcctccactggcaggggactcagaagtgatccggtcacactaagtgacacttagtgatcagaagtgccccggtgccactgagtggccttgtccaagctacatccactctgtgggctcctccttctagcagcgaggggagggcagatgtcccaggggctggtcactggagcattcctcccctctgactccccagtacaacgccctgctaagcaacatgagcaggatctactccaccgccaaggtctgcctccccaacaagactgccacctgctggtccctggacccaggtacggcccttgcagctcccctctcggcggtgccctagtgttcccacattgccctgctgcactccagaccatgcagttgtgtagggtctgtggagacagcaggtaaacccaaaggtgttgccctccaactggggctggacggtgcagatacccccacgccctgcttctcttggcaagtggacttccggaatctccagctgcagcccccacttctgtgtgtacctcggcctctcccatcacccctaggccttcctcctggctgcctggtttcccctttcgtgggtcctctcatgttccccaagagccctcaggccagggacccctcgtggcttccccttaaaccccgctccagccccctttatgagcagcttcgaggaaggcactccatccaataggccgctaagtgtctgtctgggttttggcctttgggtgtccccttggtgtcagccaccttaggtggtcatgtctctggggcaggggccctgcctgggtgtttctgtagctcccagccccctcccaccaggcctgtaggtggcccctgtctctgggggcaccgtgatgttcaggaagctggtgggagcagtaaggactggtgcaggctctggtgaaggccgttgaagacttcaacgtggaggcctcctcaccgaccctgcctgcctgtgtctcagatctcaccaacatcctggcttcctcgcgaagctacgccatgctcctgtttgcctgggagggctggcacaacgctgcgggcatcccgctgaaaccgctgtacgaggatttcactgccctcagcaatgaagcctacaagcaggacggtgagcaggcctctccctgtccaggaaccacgccaggtgtcctctctcagctgtctccccagagtcccagcccagagtcaggcagagcagctggtatgacaattccagcaggccctgagtttcccagaaagtggaggtgggaccggcctgcacccagtgtgcctggactttgctgctggcctgccccacgtggccatcctgctgtcactcctggccctgatgctcctctttgcctctgggaacctccaggatctgtttagctggctgtagctaattagaaattgtagagtggcaacccccaagccaattttccagctagctgcagatccacgggcctcgagccagtggaagagccgacttacagctgagaggctgaggtccgagcctttggcctgagctacatacctcacccccacgcccccaggcttcacagacacgggggcctactggcgctcctggtacaactcccccaccttcgaggacgatctggaacacctctaccaacagctagagcccctctacctgaacctccatgccttcgtccgccgcgcactgcatcgccgatacggagacagatacatcaacctcaggggacccatccctgctcatctgctgggtaaggacctggcctcgcctccacatgagtcccacggaagtgtgggtcccgaggtaggggtgggggatgtccagggtaagggaaggtgggttgtgaccctcacatctcacatgtgtggggcatcatactgtttgcttcacatgcaggagaccattcgtgttcccactttacaggtggggaccctgaggcttagggtcgtgagggacttagtggtcagagagctaggggccaaaccaaaggctctggccctgggtccagtgggggagccatcagcctagctcatgcccaaggaaacaagcactgtggccctgcctcaggattgagtggctggggcctggcacagccagaaatgacagtggcagcatcttgcagccccaggacatgtggccctcggaggagtgtgggtgggactgatgtgtgagatttctggccctaagccaggcctgcagcccttgagggccccagggtacaggtgccggccccagggtgccactcagcgatgcatgaagaagcaggcacagccaggcagggagccaagctgtccccttccttccttatctaggagacatgtgggcccagagctgggaaaacatctacgacatggtggtgcctttcccagacaagcccaacctcgatgtcaccagtactatgctgcagcaggtaagctctgggctcaagcctggggtggtgggggtcgggggtggggcgcaaaaaaagggagtcacagatgggcacaggggcgggaaggtttcgggtactgagcagcagcctggtgtgtctgtaggagcagtgagctggggtcggccccctcagtgaggtgccagctcctccctccaggctccacagtggcaggatgagagcaacaacgcactttcactcatctgctgtgggagtgagggccctgcctctgggaatggtggccacagagcagagaagctttcatgcacagggagttgacccgagatggggaccccagccctgtccccaggccagccagagtgggctccccctgacctggctccacacccctcctccagggctggaacgccacgcacatgttccgggtggcagaggagttcttcacctccctggagctctcccccatgcctcccgagttctgggaagggtcgatgctggagaagccggccgacgggcgggaagtggtgtgccacgcctcggcttgggacttctacaacaggaaagacttcaggttcagacatgggaagagcacgttctggggttccccggttctggggcccggggaaaggcaggcagcccaggcgcagggaagctggttcccaggcctgcctctaccctaccccagcactggttggaggctgggtctgttccagggctagggggtataggaggcctattagtccaccttctctggcagctttgacaaatagtcacttctataccttggaatggaggaagaaggcccaagtggtggtgagccagggcagggtaaagaatttgcttgtttctgccaggcacggtggtcacacctgtaatcccagcactttgggaggtcaaggcgggtggatcacctgaggccaggagttcgagaccagcctggccaacatggcgaaaccccgtctctactaaaaatacaaaaataaattagccaggggtgatggcgggcgcctgtaatcccagctactcaggaggctgaggcaggagaatctcttgaacccgggaggcggaggttgcagtgagctgagattgtgccactacaggccagcctgtgcaaaagagtgagacgctgtctcaaaaaaaaaaaagaaaaaaagaagttacttgtttctactgcggcttcatgccccagggcagctccctcctcattcctgtctttcaggtgccaatctgccctgtgccctggccctgccctgttctgtccatccgtcactctcaccctcgccctctctacgccccaggatcaagcagtgcacacgggtcacgatggaccagctctccacagtgcaccatgagatgggccatatacagtactacctgcagtacaaggatctgcccgtctccctgcgtcggggggccaaccccggcttccatgaggccattggggacgtgctggcgctctcggtctccactcctgaacatctgcacaaaatcggcctgctggaccgtgtcaccaatgacacgggtatgggagggctgagaggcccccacccagcctcacctaaaccccgctccaccccacagcaggacctcacttgccccactcagctctgcccttctttctgcctcccggccccaggtcaggcagggttcgggatcctcctagagcctcacggtgcacactgcgcccagctcagcacacctgggggtcctcttccaagcagggcccagggtctcgagggccagccataccttctctgcatctccctggcctcactttctgctgccccgccagcccacactcttaggggaccctcttctccctctgacctcttccctctcctttcatctcatctcccaacagaaagtgacatcaattacttgctaaaaatggcactggaaaaaattgccttcctgccctttggctacttggtggaccagtggcgctggggggtctttagtgggcgtacccccccttcccgctacaacttcgactggtggtatcttcggtgagaggagggatagaaaagccttcgccccagctagccctccccagcctcctggacagccaggcgcctcctgccccagccagttctagcctctcctctctaatgatgtcccccgctgtgacccaccgccttctcctttcctgcctgaaactccctcttccaggaagtcttccccagttcctcaggatggggaagggttgccgggtggaaatgccttttctacaaaagttaaatccatctgtttgcaacctctaggccctaagacaatttaaccatccttttccagaaccaagtatcaggggatctgtcctcctgttacccgaaacgaaacccactttgatgctggagctaagtttcatgttccaaatgtgacaccatacatcaggtattagcgcccccaccccacccacccccagtactgtcacaccctcaatccacttctcctcctgtgatcctagctgcctcatccccagggcttgtccccatgctcctccagacctcaaaggcctggagttagagtggcccactctcctgagcctgtcttgggtctcccttctcccccaagatagcttctggtccagcctctgccctgcaggaagctggatggtgcctgggtaaggaacccctgttcctggccccccatgatcttccctgactcccaccctgtgcctgcaggtactttgtgagttttgtcctgcagttccagttccatgaagccctgtgcaaggaggcaggctatgagggcccactgcaccagtgtgacatctaccggtccaccaaggcaggggccaagctccggtgtgtggtgggaagccgggggaagtgggaggcagagaggagcggctggcaaagggtgtggcaggaggtgtctggctgctctgatggggtggggggcaccaaccacagagctggactgatgtggatgcctgtctcctcgctatgtcatcaaatatttattgagtgggccttctggctggcatggggcgacacaaatgccccctgccaccatcagagagatcccaggccccagggtcttattgccacagtttctgcagtccattggggggcggaagtggccaggggcatgtgggccggggtccaggagcagactccagcctgagtcccctgtgcccatggtacccactctgcccaccaggaaggtgctgcaggctggctcctccaggccctggcaggaggtgctgaaggacatggtcggcttagatgccctggatgcccagccgctgctcaagtacttccagccagtcacccagtggctgcaggagcagaaccagcagaacggcgaggtcctgggctggcccgagtaccagtggcacccgccgttgcctgacaactacccggagggcataggtaaagccctgagtgaggatggtgtggggctaaggtgggtcctcaactctgggcttggcccaggccccaggttcctggtcagctcctaccagctgagccctggtaccctgtcctggagggccaggcagccccccaagctcatcagcagggcctgcgagtggggacaggcatgtctttcccccagcatcctagagagggtgtgctcagacctgagggcccctccccttccagaggaagccagacacaaggctctgtgaggtcacactgcgggctccgctcttattggccaggggacggtagctgcaggactctgctctcctgcggccatgggccagggttgggctactgcaggacttcccagcctcctcttcctgctgctctgctacgggcaccctctgctggtccccagccaggaggcatcccaacaggtgacagtcacccatgggacaagcagccaggcaacaaccagcagccagacaaccacccaccaggcgacggcccaccagacatcagcccagagcccaagtgggaccatgcaggggaggggcagggtgccaggggtgggagaggcggggccgggtagggacagggcagggtacaagggagtgcgagagggataatggcttctggtgagaccacaaacctggagaggggaggcagaggtttgtctgtttccctgcactctgtcccacagacctggtgactgatgaggctgaggccagcaagtttgtggaggaatatgaccggacatcccaggtggtgtggaacgagtatgccgaggccaactggaactacaacaccaacatcaccacagagaccagcaagattctggtgggagccacctccccacccccaaacctgagcatgtgcatacacacagagatgctgtcccgctcaccacacagtggggctgccaccacattttaaattgaatatttaaaacaatactcaatttcgggccgggcgcggtggctcacgcctgtaatcccagcactttgggagggggaggcgggcggatcacgaggtcagatcaagaccatcctggctaacacggtgaaaccccatctctagtaaaaatacaaaaattagccgggtgtggtggcgagcacctgtagtcccagtactcaggaggctgaggcaggagaatggcatgaacccgggaggcagagcttgcagtgagccgagatggcaccactgcactccagcctgggcgacagagcgagactccatcaaaaaaaaaaaaaaaaaaaactcaatttcagattttgatgaacatttactcaatgcctgagcaattcttctttccttaaaaatcagtctctgggaggcctaggtgggaggatcacttgaagccaggagttggagactagcctgggcaacatagcaagatcccatctctattcaaacaaacaaataaacaaaaatcaatctctagtaacagaataatttgtacataaataagtggtgctcaagtcgttttttaaaagattgaaagcctctgtttgtctcctctacaaaaggggctacacttcctctttaccctcattccctgcctatttggctgagcacaaattatgccactgagccacacactgttactgttccttggcactttgatctgttgcctcatctttttctcaacagccttgcaaaattggtgagcttattcccattttacagatgggatttgatattaactctgaggttcagaaaggccacagagctaataccaagctggctccttcctaagggcctttacgacacttgggggtcttctcttctctgcccctgcctggatatgtgttgcttgaccgcaggcatccagggagggtgagtactgcatccaggacgttatcagcgtccagcttgcagagagtcttataggcaaaggttgcaacttaattccactgccccctcaccaccacctccagccctcagctcccacttggggcctcccgctcagaggctgctctggagctcctgggccctgtgacaccatccccctgtgccctcagctgcagaagaacatgcaaatagccaaccacaccctgaagtacggcacccaggccaggaagtttgatgtgaaccagttgcagaacaccactatcaagcggatcataaagaaggttcaggacctagaacgggcagcactgcctgcccaggagctggaggaggtgtgtggctcgcaaggtacagggagaggggaatcctggggcagtgagcccaacacagggtctggcctggccttcacgctgcttcctcttcctcgttgtatcaagtcatggcatctgccatgcgatgtgcacctcagaactgctgagagggcagcgctccccagctccctggctccccacctgccagcccatggggcctgggggtagtgcaggccccagagagaccaagtgcaaaggagtacagctcattgcctctccttcctcctgcagtacaacaagatcctgttggatatggaaaccacctacagcgtggccactgtgtgccacccgaatggcagctgcctgcagctcgagccaggtgagagctcatgtgcaggctgagtgagaggcgagggctgggactggcatggggcccgggggtgctgggtgagagcacagagttgggttcccctcgctcttggggtcagcgtgcccaggaaatgccctttcttgttttccacgaggggggcttctctgccccactgagagccggcacctacttcataccatgccccgatcagctgcccctccctcagaaccgccctctgcttaagggtgtccactctctcctgtcctctctgcatgccgcccctcagagcagcgggatctcaaagttatatttcatgggcttggactccaaatggggggaactcggggacactagctccccccggcctcctttcgtgaccctgcccttgacttcctcaccttctctgtctttcctgagcccctctcccagcatgtgactgataaggaaattgagtcacacagcccctgaaagcgccagactagaacctgagcctctgattcctctcacttccctcacctaccctgccacttcctactggatagaagtagacagctcttgactgtcctcttttctccccactggctggtccttcttaccccggcccgtttgaaagagctcacccccgacacaaggacccgcacacagatacctcccagctccctctcaacccaccctttccagggttggagaacttgaggcataaacttgcttccatgaggaatctccacccagaaatgggtctttctggcccccagcccagctcccacattagaacaatgacaaatagaaggggaaatggaaaataaacaggagaaacggttttcccaggacagggtttggcctacaagttgtggatgtgggtacccatgccaagtgtgaggggaggctggccgggtgtggtggctcatgcctctaatcccagcactttgggaggccaaggtgagtagatcacttgaggccgggagtttgagaccagcctggccaacatggtgaaaccccatctgtactaaaaatacaaaagttagctgggcgtggtggtagatgcctgtagtcccagctacttgggaggctgaggcatgagaatcgcttgagcccagcctgggcaatacagcaagaccccgtctctacaaataaaatacaaaaaattagttggatgtggtggtgcatgcctgtagtcctagctgctagggaggctgagatggaaggattgcttgagcctgggaggtcaaggctgcagtgagccgagatggcgccactgcactccagcctgggcaacagagtgagaccctgtctcagaaaaaaaaaaaaaaaaaaaaaggagaggagagagactcaagcacgcccctcacaggactgctgaggccctgcaggtgtctgcagcatgtggccccaggccggggactctgtaagccactgctggagagccactcccatcctttctcccatttctctagacctgctgcctatacagtcacttttatgtggtttcgccaattttattccagctctgaaattctctgagctccccttacaagcagaggtgagctaagggctggagctcaaggcattcaaacccctaccagatctgacgaatgtgatggccacgtcccggaaatatgaagacctgttatgggcatgggagggctggcgagacaaggcggggagagccatcctccagttttacccgaaatacgtggaactcatcaaccaggctgcccggctcaatggtgagtccctgctgccaacatcactggcacttgggtcccttcattttcctcaaagaggtgctgtgaaaccccaagcctaggaaaaggtagatccctggaggaggcaggtaatgtggtgttgggagagcctggctgtgtcccctctgtaggctatgtagatgcaggggactcgtggaggtctatgtacgagacaccatccctggagcaagacctggagcggctcttccaggagctgcagccactctacctcaacctgcatgcctacgtgcgccgggccctgcaccgtcactacggggcccagcacatcaacctggaggggcccattcctgctcacctgctgggtaagggcacatgtcgggccttgaggagggtaaagacggaccacagtgtgagtgagggttgggacagggctgactagagggtagggagcaggctggggactgagagactccagccctgtgggggatggttgcccaggctggaggggggtgggcgctgggagtggggagccccccacttgcatctggtgccacattcactgcagatctatgtcgggcaagtcaccatggatgggggaagaagttaataatcttgtccaggagaccacggcacccatcacaacattgtgtgatcttagagggcgaggaagaggctgtgagtgggagctggggaggctttgccaagaggtggcctgtgagcagggcctcggaagatgacagggtttgacagatgggaagtgggggatgagaggacagacgcagtgttcaggccaagggaactggaacaaagaagaacctgagaatgtaaatctacttcaaccctggaccctcctttgccaagggctgcaatctcagatgccctgaatgtgtgaagtaggcggtgaggacagtaagggatggtagggagtaaggcaaagcagaggctactggttctctgtccctgatgggctgttaggaacactttcctggagcagagagaccagacaggccctcagaccatttagaaactataagggaggccccagaggacggcctggctgtgggtctagctcccacacaggctgggagtccagccctcttcagcccctctctggtgagaccaaagaacatctggtgatgtcacagtggacgtcagttcaccaactgggagacacaggccccgggaagaaaagcaacatgcccagcgtggcctgggagctggggcagagctggccttagaactcagcccctgacaattggtaaaaggggaaaggggagcaacctaacactgatgcgctctctgtctctctctctggctctctccctggctctctccctcttctctctcatgttctctccatcactcatcgctctaaccctctctcactggtttgcactttagacttcatctgatgtcagccgaagcttcacctcacttggctaggaaagagccttgagtccaaatctgtttctgagccttccattcatcctgagtttcttccttttcctctgtcgtggagaactaggctcttttcttacactaaactcagaggcatcagcctctcctgaaggagacggctggttcctgtcagagttgctgagctgcagacaccgacctcaggtggtgcggaggggacatggcagagtggctggtgaagagagcagcctgccagcctttcaatcccagccctgccacttaggagccgtgggcccccggcgaggggggcggtcacttaactctccagcctgtttcctttactagccaatgggaatcgtgacagtacctgggtgcagacaggattgaaagtgaattcacacaatgttcttggtgcagagccaataagaggtggccaccggggtgtaggtgttctggggacctgtaatgtcctcacatgtcagcagttgctagtcacattggtctccactgctcacggacagtgaagaccacctggattccctgataaccagcaaggcccccacctagagccaggcagtaatgacctactgggctggatatgcacaccaaagatgatgtgtgcctcaaagcttgcaaacagtaggtgctcaagaaatgccactatgattagcaggactgggatctggagcgctcttcctgcaggagggcattgagcctaagtaacatttgtctttcctctctctgccgtcccccacactcgcctccagggaacatgtgggcgcagacctggtccaacatctatgacttggtggtgcccttcccttcagccccctcgatggacaccacagaggctatgctaaagcaggtccgcaccagcccaggggcagggaggccccgccgggatgggagggaccctctgattcaggagttccctccagtttagccctcccccgggatccccacggcagcacgcagtctgtccccggaacccccagtttgggcagaactccctctgcttgcagggctggacgcccaggaggatgtttaaggaggctgatgatttcttcacctccctggggctgctgcccgtgcctcctgagttctggaacaagtcgatgctggagaagccaaccgacgggcgggaggtggtctgccacgcctcggcctgggacttctacaacggcaaggacttccggtacatccagctagggctcaggtctcgttcctgagccccacgggcaagggaaatgaaccaagcaaagggtccactactgtcccccagctggagccagcagggcaggatggggacagggccagagtttgggactgagtgtctagagaggtgttggcttctggcaggaaaaccccatccgcctgatggggacttctgaagcacgcaacagctctgtcagcctggccgctgggaagtgctcaaggtcccagtcctgggtttgagcatggtaggctgccccgcgtccctccttgggagcagcccctgcatggagctggcctctccctgggggcacatgctgtgacacagggaggcacacgaggatgttgggtgctctgtacagatccactctcacccctgacaggctcagaagctgccttccttggaggatggcgttttagttacctattgctgtgcaaccaagcaccccagagcttagccttacgaaacaaccagttgattttgcttatgattttatgtgccaggaattcaggcagtacacagtggaaatggcctttctctacagggccccctctgttgggggcagctctcacagccgggatggctcaatgggggccatacgtccagagccccagttctggctgtcggttgaggtcctcggtttttcccatgtggcagatgctggggcacatgttcccagtggcctcttggctcacatgttgggtgcttggggtgagatggctggaacggctggaggtgggtcaggcatctctccaggctagctcgggcgccctcccagcgtggaatctgaggtgggcagatttacctggcagccagcatcccccacagcaactactgacgcagccagttctcaaggctaggtccaaaactggcccagagtcacttctgccatgttttattggctagaacaagtcacaagttcacccagattcaagagaagagaaaaaagtccctcccacttgggagaagtggcaaagaccatctgtcacagctgaagaagtgtctcttacaaggagaacagacacggggagcctgaaacaaaacccgatgggattccctgggctgtgcaggcccttccaggcatgaggactcagccacagggctgagaggagacaggatctgggggatgagagcccttgtggggtcttcccttttatggggagtcagaggagaagctggatagatccccagccttgtggccaggatgctgggcagctcttccttccccctccccgatgagaatgacagaaaaacaggattcacctgagccaaaaggcttccagttagatccaagagagaatttcccgcagtttgaattggtttgctaaacaacaaggaagggctgggtgcggtggctcacacctgtaatctcagcactttgggaagccgaggcaggaggtctgcttgagctcaggggttcgagaccatcctgggcaacatagcgagaccccatttcataaaaaataaataagtaaatgagaacaaggaaggactgacgagagacggtagaaccttctggtttgggcagctctgcagctgccattcatcctggccataagaattcttggggtgaataagtttgtcgctgttgggccgcatgagatgcagaatcgcccactctcacccctgacagaaacagttgtttccttcagggagcctccatcttgggagataaagcatgtgtacatgggaacccactggccacacattctctagaaagtacacaatgtcccagtgcctctagagcaagcactttgtacagtcagaaagcaacaggtggtgggggctggagtcattcaggaaaatgggaggcagaggaatggcctgaacggcccgatgctaggggcttctgcccccagattccctcttacgcacactcagtggttgcccttcccctccctccccacagtgctgtgtcccctgcatgctgcagtgctggggtctgccctgggtatagcaaggcccactgttcccttatgcccagggcttctcactgtcctctcccaacaccctctcccccactccactattcctaggatcaagcagtgcaccaccgtgaacttggaggacctggtggtggcccaccacgaaatgggccacatccagtatttcatgcagtacaaagacttacctgtggccttgagggagggtgccaaccccggcttccatgaggccattggggacgtgctagccctctcagtgtctacgcccaagcacctgcacagtctcaacctgctgagcagtgagggtggcagcgacggtgagagagaagcgggaggccctggtgggctgaggaccaagaaagggtggtgagcttgggaggtgggaaaggggcacttagtggcccatgggcagaggtgtggggcagagcaatcggaaggaagggagccacccagaccatcccaggaggcaggtcacagggcccaaaaggtacagcacccccacccctccaccatcacaggcacaccagggccaagccgctaggaccctgggtctgacagctgggctcccttcccttgcagagcatgacatcaactttctgatgaagatggcccttgacaagatcgcctttatccccttcagctacctcgtcgatcagtggcgctggagggtatttgatggaagcatcaccaaggagaactataaccaggagtggtggagcctcaggttctggaacactcccacgggatgcgggctgggggatctctgcgagtgtctgcatgtgcctgggtgtctggatgggccagggtaggggagtgtgtgtgtgtgtgtacactattgtgtctgtgcatatgatgtgtgtggtgtaagtgatggggaaaacggggtgattgtgcacagaggcccagcacgcaggagaatggggtgcccagtatagccccaagtgcagggaccctccctcaagtcaaaaatgccacccccagcctggttctccccaaactcatcttccaacatatattcccactcgacaggctgaagtaccagggcctctgccccccagtgcccaggactcaaggtgactttgacccaggggccaagttccacattccttctagcgtgccttacatcaggtaacgggaaaggcaggagggcacattgtgaggggcagtacccacagctttgtgtttcaactgcggccactgcccggtccacaagctctgtcagtcagggcagacccgggggagccggccgcacggtgcaggtgcctgggcccactcacactgccaaggctgatgggttttttcttgaacattcttttgatgagagtctgtaccatccaaacagttgaacacagaaactcaacctaataattggctaatggttaccagaccttggttaagtagttaacattaaccacgactcatggctggatcatgagctctgcactgttttgttttgcttttaaaacaagactgtgattcttttactattattgaacattgtctgcgatacaatttgaattgtacctggaagcccttctagacactaaaatgtaggattggagatcggttaaggtgggaggcagggttgctggggcaagttacagtcacaggctggggtcagacagaactgggttcaaactccgtctccattactttgtttccttgagaaaattcctcaatttctgtgagcttccatttcctgacctgtgaaccccatttcacaggatgcacgatggctaacttcttagcattctgtctcatacacagcctcctcagggaggggtggccaggaccccactattcatcactctctagtggaatgtagctgcacactaggtctgcaggtcacatggccacagatgagtgtgcccaatgcagcccctctccttctgtgtgccccgggagagcacttgctgagggctagcaaggctgtttgtgatccgggaggctccctgggaggctgggggctagagagacctcaggctggagttccaggtgcccccgggctacaggtagcccaggccacccccagagggctgtggctgcctctggccctggcctcccgtggttcctggaagcccagcaagggcagggcccatgcccaccttgcctcctggcacctgggatgatgccagcacatcatcaagtgctaataactgattgtgggatggatgaagtctgtccccagagtccaggaagagggcatccctggagcacctcagataggcctgacctagacggtgctccagagatgacacttaggacagggctcccgcctgcctgctggagtggtccctggggttcccagccggcgctggctctcacccgggagccagctggtgtgatggctagcttcccagcttaatgcagacaattctccaaacaggggtgggcaaaggagacttggctgctctagaaaaacattccggattctggccagcagccttcacaaagcacttttaggaaagaccagggaactaggtggtacatgcttgcacccagcattcaaagtgagaggcctgtgccactggctcaggacatttaaaacctcttcagactttaagctggggagaatcctccagccttgactggcagatttctaccagggaattcgtgatgctttggataagatcatgtaggactggcttccctgcccagaccaccctagtagatccacacggcccatttggccacaccttgcctctacttgcatataccccagggatggagacctcactgcctccaaagccacctgccagatctctgaaggctctgccctgaccccatggagcaggccctcctgagttgtggaggcagctctgtgggtgggaggcatctacacaggcacggctaggaagaggctcagacaatgctaagagctggggtgggggagctcaccctgatagctgtgggcagagttggggggccttggctctgctgtgcgcatgtgacttagcacacatcacatgtgatgtgcagaagggcctggggcccagtggcacaaggccctcaaccaactccgccccgggccacggcctcgctctgctccaggtactttgtcagcttcatcatccagttccagttccacgaggcactgtgccaggcagctggccacacgggccccctgcacaagtgtgacatctaccagtccaaggaggccgggcagcgcctggcgtgagtgtcctccagccctcctttgtttccatgctctggcctgcgcccctgggccttgaggggtctgtccactggagcttttgtgggaacacttgccattttgagccgggaactcccacctgcagcgtgggccaggcctgattgccatctccttaggcacctggagccctggggccctgggacaagtttcagctgggagtgggtatggagagtggatgtcaggtgggggcaagaggggccatgtccttctgactctgcctccctgtctcatgcctccccaggaccgccatgaagctgggcttcagtaggccgtggccggaagccatgcagctgatcacgggccagcccaacatgagcgcctcggccatgttgagctacttcaagccgctgctggactggctccgcacggagaacgagctgcatggggagaagctgggctggccgcagtacaactggacgccgaactccggtaccgccacccaccccacctccagccttgggtcttaaccccctccccaggctgggcagccatgcggctgacctcggagcctggccctgccccgcacccttgccctgccctgccctgccctgcccatgctgtctccttgcttcccgctcagctcgctcagaagggcccctcccagacagcggccgcgtcagcttcctgggcctggacctggatgcgcagcaggcccgcgtgggccagtggctgctgctcttcctgggcatcgccctgctggtagccaccctgggcctcagccagcggctcttcagcatccgccaccgcagcctccaccggcactcccacgggccccagttcggctccgaggtggagctgagacactcctgaggtgacccggctgggtcggccctgcccaagggcctcccaccagagactgggatgggaacactggtgggcagctgaggacacaccccacaccccagcccaccctgctcctcctgccctgtccctgtccccctcccctcccagtcctccagaccaccagccgccccagccccttctcccagcacacggctgcctgacactgagccccacctctccaagtctctctgtgaatacaattaaaggtcctgccctccccatctgagtctgtgtccctcacagggaagccagggacagggacaggctgctttcctgcctcctggcagtcaagtgggtcccgttactaggtttgttcctccatcctccttcaggagccggggaggatccccagagctctgccccagcacctcctggcgctggcgcctgtcttccctccagcccaggcagcccgccactgtcctgccaccgcaggcagcccctgtctggcccaagcactgacccacgcggactctgggaagcagacatcctgggctgctggcctcacatttccactggcagtggagcctttccctgctccacaaatggccaggtccccccaggggaaggcttccggctgttatcggctgcctcagggggcgagtaccttggagggcctgcttcaaggagggtgccccctggagggcacacaccagcctagtgcttaccttggctcctgcctgtaccagctccatgactctgctcgggtgaacagccttggctctcagacagccattctaacactgccagtgcagaggggcctcagacgctggagtgtagcagtggctgcacctgcacagggattagctgccagcagccaccctgctggcgtcccagcacacacctcctcactccctgcattggagggagtgtcattttaagggacatttttatgacttttatgtgtatgtttatgtagaaatttggaaaatacagaaaactgtaaagaaaataaaagccctttatatcaacgtcaagagataagccctgttgacgttttggtgtacaacttgccggacttcttctcagcacatgtgtattttaaatgggatcacaccatatttacagtcatacatccttttatcacttcatacaactagatctgtttttctgatatttaaatgccagacttcgaacttggccaatagaagttggtccatttgctggggccaggggctccccagccacccgggcccctctgtcaaaccctcagccctgagtctcttctgggctttgctgatgtcttcaccctagctaggtccatctcccaatatctgtcccccttagtccacagcttttgccccccaatccaggtgccgtgcgtgtctctgtgtgtccgtgtctgtgtgtgtgttgtacacaggcttggctgttacaggcccattctgtaaggcaggatgtggggctgaggtattttaggattgaaagagggtggaagtttatgattacataggacaatggaatttataaacatgtcctctaaatggttccgagtcatctaccaatgaagacttcttgaattatccccccttttcccagcctgttttgaaagctctttgtttaccagacaaaggtcatcatcatatgaccccctttgccttttttttttttttaagatggagtctcgctcttgttgcccaggctagagtgcagtggtgtgatctcggctcactgtaacctccacctcctggctttcaagcgattctcctgcctcagccttccgagtagctgggattacaggcgcccaccaccatgcctggctaaatttttgtatttttagtagagatggggtttaatcatgttggccaggctggtctcgaattcctgacctcaggtgatccacccacctcggcctcccaaagtgctggaattacaggcatgagccaccatgcctggcccccgtttcctatttttatgaaccacagcggttcatgctgcctgtcagagcttctgggccgcgtgaggtcaccagctttcaacacgcaaaggactgcactgcagctgggggaagagaaactccacactgcattggcctggccagccttaccctctgggcttttgaaatagtatcttttttctgtttgttttcaaacagagtctcgctctgtcgcccaggctggagtgctggagtgcagtggcctgatctcggctcactgcaacctccacctcccaagttcaagcgattctcctgcctcagcctcccgagtagttgggctactacttcaggcgcacgccgccatgcccagctaatttcttttgtattttagtagagatggggtttcaccatgttgcccaggctggtcttgaactcctgagctcaggcaatccgcccgcctcagcctctcaaagtgctaggattacaggcatgagccaccgcgcccggcccaatagtatcattctttagatgcctgcctctgcctccttgggtgagtggggagaggcaggggatacctggaaggtagcagaggaagaggaggcggtaacagcaggaagaggggccaccccagtgttttctactggtggccctgaaggctgagcccatccccgtgccatgcctgccaatgccgctcttgggagaccagctctcacctacgctagccacaggtggtggctgccagacagtttctctgatccccacagccctccccaccctctaccttcctctgtctgcctaacccccttcccacccaccctggcttttaacataagtgaaaaagtggctaaccccacctctgcacttatcacctgtgtgaccttgggcagtttgtttttgcagtctgcattttcttttcttttctttttttttttttttttttgagatggagtctcgctctgtcacccaggctggagtgcagtggcgtgatctcggctcaccgcaagcttggcctcctgggttcacgccattctcctgcctcagcctcccgagtagctgggactacaggcgccagccaccacgcccggttaattttttgtatttttagtagagacagggtttcaccgtgttagccaggatggtctcaatctcctgacctcgtgatttgcctgcctcggcctcccagagtgctgggattacaggcgtgagccaccgcgcccagcctgcattttctttcttacggttcttatcaaccctctcagcgttgccatgaagatgaaatgagatgatgtacaaagtcctagtagagtgtcttctctttataatgaatgcatcgtctcctgagaaagctagtttcataacaaccccagatcagccaagtccagatcagccctctcacttgagacaggaagaggactcggggcaactgggtgccggagctggactgaaaactcccatctcccagctgccttccaggaacttccccaccacacgtccttgcacagccagtcaactgtcttcttactgggagcacacagagctcgtccactgggggcccacagcttgcctcagttccgggagtactcagccatctccctgtgtcgcctctccctcatcatccctccccatgtcacatctccctcagcctctccgtgttacctctccctcatcctccctccccatgttgcctctccctcatcctctctctcatcctccctgcccgtgtcgcctcttcctcatcctctccctcatcctctccctcttcctctctccccatctctcctctccctcatcctccctccccatgtcacttctccctcatcgtctccctcatcctccctccctgtgtcgcttccgcctcatctcccctccccatgtcacctctgccttatcctctctctcatcctctctccccatctctcctctctctcatcctccctccccatgtcgcctcttcctcatcctctctccctatgtcacctctccctcatcctctccctcatcctctctccctatgtcatctctccctcatcctctctccctgtgtcacctctccctcatcctctccctcatcctctctccctatgtcacctctccctcatcctctctccctatgtcacctctccctcatcctctccctcatcctctctccctatgtcatctctccctcatcctctctccctgtgtcacctctccctcatcctctccctcatcctctctccctatgtcacctctccctcatcctctctcccaatgtcatctctccctcatgctccctccccgtgttgcctcttcttcatcctctccctcatcctctccctcatcctccctccctgtgtcgcttctgcctcatcctctctccccatgtctcctctccctcatcatctcccctcaccttcgaggatccccataagaccctgcctggggatttctatcttgccctctgtctcctaactcttgctcatagtgctcaccccatttcctgtcctgtgtgcctggcgattccccacctgtgtcctccaggcccggtgcttctgatttttagcctactgtttaatctggctgtcgagagttttgtcgttccaatttaatccctatatttttcattttagcatccctgcttctttcaaacctcctgggttttcataaacgcctgtttttgcctcacagattctgttctctgaatcactttaaagacctggtttttttaattgtggcaaaatatacataatgtaaactcaccatcttaaccatttttaagtgtacaattcagtggcactaagtacattcacattgttaattgttgtgcagccatcaccactgtccatctccagaacagtttcatttttctgtgtgtgacaaggtgcccccaaaaagtgtgcttactctgttgtccaggctcactgcagcttcaaccttctgggctcaagcaatcctcccacctcaagctccacagtagctgggagcacaggcatgaaccaccacactcagataattttttttaagtttttagtagaggccaaagcacggtggctcacgcctgtaatcccagtacttgggaggccaaggcgatcggatcacttgaggtcaggagtttgagaccagcctggccaacaatggcaaaacctcatctctgctaaaaatataaaaattagccaggtgtggtgggggtcgcctgtaatcccagctatttgggaggctgaggcaggagaagcacttgcacccgggaggcagaggttgcagtgagccaggatcatcccattgtactccagcctaggcgacagagcaagactctgtctcaaaaaagaaaaaaaaaaatttttttttggtagagatgggatctccttatgttgtccaggctggtctcgaacttctgggctaaagtgatccacctgcctcggcctcccaaagtgctgggattacaggtgtgagccacagtacccagcctctgtacccattaaacagtaaaatcatacagtatttgttttgtctctggcttgtctcagcataatgttttcagtgtttatccatgttataggatgtgtcagaatttccttccctcttaaggctgagtaatattacattacatgtatataccacattttgtttatccattcattcatccatgaacatatgggtttccaccttttggttatggtgaataatgttactatgaactgtaaaaaaaagtaattcaaaatcaaagctgttgaaactttaaattattctgagccttgaaggaaagtaattttgggacctgagtcacttacgggcagctatgaactttgtttccttgattatagattactccttttccccttagctacatcattttgtaaaatgttataaaagactgaagggtgccatagaagttccctttcctcttttctgttgaacttcattatagatgattaacttccctcttccttctcctacgcaaagacctcacgactgtcacattgtccaagatgtgttaaatgtactcttttaaactgaaaaaaagaaaataagctattactaatcaaattgctgtacctcataaaccaaacttatatgggaaatgttgtgattctacctaatttcttagttttctgactataaagtaagaccttaaacttttcagcttcagagcactgaccccatttctttggagcctgtgagaatggccgtcctcagcttcacgctcgaataaacctgttaaactggattctgatcttttttattatttcaggttgacagaacactgtgtgcaaatatctgtttgagtcccagctttcagttcttttgtgtatatacccaggaggattgcccgatcatatggtaattctatgcttcattttttttgaggacccaccagactgttttccgcagcggctctgccattttcccccagcaatgcacaaggtttccaatttctccacacgttgaccgactcttgttttctgtttttttgataacagccatcctaatgggtgtgaagtggtggctttgatttgcctttccctaataattagtgatattgagcatattttcctgtgctgatgagcagctcatgtattttctttagagagatgtctacccgagtcctttgcccatctttgtttttgttgtcgttgtttgtttgtgtttgtttgtttgttttgaggtggagtctcactctgtcacccaggctggagtgcggcgaggcaatctcggctcactgcaacttctgcctcctgggttcaagcaattctcctgtctcagcctcctgagtagctgggactgcaggcgcccaccaccatgcccgactaatttttgtatttttttagtagagacggggtttcaccgtattggtcaggctggtcttgaactcctgacctcaggtgatccacccacctcagcctcccaaagtgctgggattataggtgtgagccaccacgcctggccctttgcccatctctgaatgtttgagtttgaggagttctttatgcgttctgggtattaattccttagcagatctgagagtaacagatattttctcccattccatggattgcctttttgctctgttacagtgttttttgatatgcaaaagtttaaaattttgatgaggttcaatttgcttattttttcttttgttgcctgtgcttttgatgtcatatccaagcaatcattgccaaatccaatgtcatgaaacttccctctgtgttctaagaattttgtagactttgctcttttgttccctctttcttctcctacacaaagatctcatgactgtcacattgtccaagataaggtgttaaatgtactattttattatttttattttatttatttattttttgagacagagtttcattctgtcacccaggctggagtgtagtggtgtgatcttggctcactgcaacctctgcctcccaggttgaagcgattctccagcctcagcctcccgagtagctgggattagaggcatgtgccaccatgcctggctaatttttgtatttttagtagagacaggatttcaccatgttggtcaggctggtcttgaactcctgacctcaagtgatccacctgcctcagcctcccaaagtgctgggattacagacatgagccattgtgcccagccttaaatgtactcttttaaattgaaaaaagaaaataagctgtgatccatttttgagttaatttttatacatggcataaagacctgcattttaagtcccttttggattgctctgctacttgtccttcctccattgcagtctgcttcattcattgtgtctgcagtttagcacaagctctggaaccaaccatatgaatttgagtcccacttccaccatccgctggctgtgtgactatgagcaaattcctcaaccgttctgtacctctctttcctcatctgtaaaatgggagcgttgatcacagtacttacctcatgggtttcttgtgaggattcatatgttgaaagcccccagatggtccctggcacctggaaccaacccacagtgagggttggtaattattattgtccctcctaaaactggattttctcttatacttggtaaactgtacctatcagccatcttcagttgggttggaatggcctgcacaatcccatgcatgcacctgacgcttgcaggggctcccagcttggcagagacgccatttccatcgggatcagctatccccccacaccaatgctgcagctctctggatggatgcaccctgacctcccctgtgttagaggagaggtgggcgtgttgaatcatggaggcagacttcccctttgccgttctcgtgatagtgactgagttctcaggatctggttgtttaaaagtgtgtagcgcctcccccttctctctctctcctgccaccatgtgaagatgtgcctgcttccctttcgccttccaccatgattgtaagtttcctgaggcttccccagccgtgcttcctgtacagcctgtggaactgtagagccaactaaacctcttttctttataaattacccagtctcaggtagttctctatagcaatgtgagaatggactgtctacatgcttgaagcaggaagggagactttcctgtgagctcagtcgatcagcttaaccagaagtgtcactatttttttctttctttcctcatgttataaatatattttacccataatggatcatattggggggttatttggtcagtttctctagtcgtggtatcagcccatgtgtagaggtagggcctttttgaagatgtgagccattgtgggctgagagtgatggaaggcaacccagggtacagggattctgagtgtggagggaagtgagtctgaggagaaatccaaggtgagacagatggagctggcctccacagacctcagtgcaagagtactgggggtgaccacaggcctacagagagctggtgtcttgccagctggttttcagatcaggctcaggtactcatgggcatgcaccctggatggagggtgcccgcctcacctctccacaccccacccagtccctaccttgtgtgccctctcctaattgcaaactcataacatcagggtctccctggagaaacaggtatgatggggagggccctgcacagccctggggttgattgcacagcccataagagagaaaaagcccaaacacgtgaacataagaggtcaagttagaagaacctagagagataacctggcttccagagacccagatatatcacatccatccatccatccatccatccatccatccatccatcatcccatccacctgctcagaagtggtcccagcctatggagggagggcctcatcaatccctggccataacccaagggtggctcaagccccagggaaaagtggccgaggagagcagaacaagttctggcctaaaagtcaagacccctggttcctctttttggctcgccattagctaactacatgaaccagatcatttggcttgactttctggacctcagtctccccacctgtaaaatggggacagttggaccaggaggtggatggggatttccagttctaacattctgtagctgagcctctggcctctgacgtcacaatatggagctggcctcacccagctctgctgctctgttggtcatgggagcaaggtggacttgccctggaccttccctacttgtgctcctctgttatgggcagctcttgccttggctcaggatcaagggtgaacacagtttaggtgtggctgggaccccaagaagcatgggaccagacaaagggactgggtgcggacaggaccttctcagcacatgatgcccatatccttccctgcagatgacttctacaatgagaccgagaccaagatcttcctgcagttttatgaccaaacaggtgaagttgtgttgaacaagttcatggaggccacttggaactatgtcaccaatatcaccaggaaaaatcaggaggagatgatgtgataccacctccaccccagcctctcctctctttgctctttttagggatttgggaccatggggcaccacatctcctgcccccatcccaagcaagaggaacaagggaagccccagtgtacatgtcaaagagggctgcaagctctgggcctcctggaagccctaaacttcctccaggcaagaatctcttgcttcttgtcctttgtaaatctcacctccttgcttttagagatccaggtttctgccctctccctctcagcaaatcttgctccctaagccaatgggattagggagtcagttagggtgccatggccctggaggtcaagtgggacccttcccctgtcccccaaccttggtggctctctttgcagctgcacaaggacatggagaggtcccagttcatgatttactttggcacccaggcccacctgtttaaagtcacccagttcaaggacccggatgtgaatggcatgctgagtaagctgcagaacatagacaaggcggctctgtccaaggacgagctgcgggaggtgatggatggaacccccaggcctttaggcacatgctccctggtcctaggggtctggtaggggagacagagtgcctggggcaggagggaggcagggagtggaggaagggcaggatcagaacttcctctggagaaggagaggagtagaggtgggggtaccgatctctcctggctggtggggcgagcactggggggggacctggggcaccagcctaccctgggtaacacctgtccccccagtataacgagcttctggcctacctggagatgacatacagtatggcccaggtgtgcctgaatgaggggccctgcctgtccctggagtctggtgaacacccaagccctgtcccacccaaccacagaatctccagcactcagtcccttccaggggcccctcccagcccccaaccaccctcccttattgccaggagggtgagggaagaggcaagtgggagtgggtcccccatggctccttttctgggcatagaactcgaagtcatggccacctccagggacaaagaggagctgctgtgggcctggcagggctggcaggatgccgtgggccgccagatctgcaccaccttcgagcactatgtggagctcagcaacaaggctgcacagctcaacggtgagcagatgggatgccacagagcttggagtgatggcaaggaaggggcaaagctgagctttcccagagtgaaggtggccgtagggccctggagacaggacctatgagccctgcagctgggctctccaaatattcatagagcacctaggtgctaggtgctggggaggttctgacgacacataggtgaaaagacaggcacctgccctcatgcacctacggtcctgcagggagacagaccatattcagtaaacacctgtctctcactaccatctggggtgatgcggaataggaagaggctgctgagaaagagaatgagaagaggctgctgcagacaagtggacagggaaggcctctgacatttatccaagacctgaaagatgggcaaaagacgggaagcaagatgtgaaagaagagcagcctaggcagaggctccgcggcaggaggagccggtgctctggaagacctgaaagaagcccaggtggccacagggctaaggatgaggtgggataagaggggactcagggccttgcaggcatggtggggagctcggatcatggactttgctcagtgcctttctgaaatgggcaggtattctccccgttttgccaaagaagacccagacggtcagcgaggttgagtggcttccctagaaggcgtctgggtatcctgtcagctaggccatggctaaagggtgagatggtgagctcctggtgagtcctctctcctgtcctaggttacaaagacatgggggccttgtggcactccaagtatgagtcggataccctggagcaagacctggagcggctattccaggagctgcggccactctacctgaacctgcacacctacgtgcgcagggccctccaccgccactatgggcccgagctcatcgacctgagggggcccatccctgcccacctcctgggtaaaggccctgctggtggccaaggtgagtgccagataagggcagagactgtctccagcctcctcttagcccctctcctcctcttccagagaacacgttggctcagtcctgggtcaacatcttagacccggtcctgcccttcctgaagaagatcccagaggatgtcacaaagatcatgaaagtccaggttagtgcttggcctgtctgtccctgcccctccccactggcatccttggacaaacagggcagcgccccccacaccccctcttctcccatagcactggaagccagagaaaatgttggaagaggctgagacattcttcacctccttggcgctgccacctgccccacccagtttctggaaaaagttgatgctaatgaggccaaccgatgggcgagaggtggagtgtcacatctctgcctggaacttctaccaggacgacgatttcaggtgctcacagcggcaccacacacccggtcctctcctctgccctgtctggctgtcttaggtatgggcaggggaaagccagggcagaggagggagaaggcaagtgagaaacacagaaggaaaggtgacgtgagaggaaagggcttggttgctgggtggatatggggcctggagtaagaaagaacaattgccggccgggcatggtggctcacgcctgtaatcctagcactttgggaggccaaggcagtggatcacgtgaggtcaggagttcgagaccagcctggccaacatggtgaaaccctgtctctactaaaaatacaaaaattagccaggcatggtgacatgtgcctgtaatcccagctaggaggctgaggcaggagaatcactggaacctgggagccggaggctgcagtgagccaagatcgcaccattgcactccagctgggagacacagcaagactccgtctcaaaagaaaaaaaaaaaaaagaacaactgccaaggcctgtctgggctccaacccgaccacccaatccctcaaggagtctgaatggggaaactccctttctccatgctccttgacccatgccctttgcttgtagaataaagaagtgcgcggaagtgaccacagaagacccgctctccatcttccacgaaatgggccattccagtacttcctgcagtacaagaacctctccatcatcttccgcgcaggtgccaacccagcctttgaagaggctgtggggtctgtgatcaccctctcggcctcctcccacaagcacctgctcaacataggcctgctcagcctctagcaccaggactcaggtgatgaggatcaagggcccagcaggagggcagcacaagcctgggaccgcagctagggcttggtggggtcagggctctcgggcaaagctacgggaaggagatcccaggggttgcctcttgactgccctcaccctcttcccagaggatgaggtcaatttcctgatgcatattgccctggagaagatcgccttcatcccctttggctacctgatggacctccttcgctggaaggtctttgacggcaccatctggaaggacatctacaatcaggagtggtggaacctcaggtgggttgggcaccatcttccaccagatgggccatttccaggactttctgcagcacaagaacctctctaatcttccacacaggcactgagcaggtcttttagcctttctaggcttcagtctcctcatctgtgaaaaatggaccctggtgatggccccacctgctccctgggtagctgggaagctcacacaatgattgcaactgagcttctctaatcacagaacactgaccaccaggcaggccctcccaaacctccctcccttcctggtgccaggcaatggagtgtgcgggggcctgagcactttcctttctggggaaagactccccatgggagagaggcaggcccctaaaatgcacgcatgcctgcctcgggcttaacatccccaagctgccatgggaacccaccagcagttgggaggcatcactctcgagtgagggacccccgtgttacacctcatcactgacccctggccatttgatgggataataaatgcctgtgaccagggctcctccatatgtggcaggccgcggactgaccagcttcagtctgctggtcatagtgtgattcggggttgccagggggtgctcctggctctgcaacaggctcttactttttttgtttgttttttgagacagggcctcgctctgtcactcaggctggagtatagtggtatgatcacggctcactgcagccctgacctcccagcctcaaccaatcctccttcctcagcctcctgagtagctgggactataggtgtgcgccactatactggctagttttgtgtaatttttttttaagagatggggttcgccatgttgcccaggtttaaactcctgggctcaagggatctgcctgcctaggcctcccaaaatgcggggattacaggcatgagccactgtgcccggcctcttatgtttaatttgaacatttacaaccaccttgcgttgtgatcacttcaaagcgctcagctcacagaagcaacagctgaagctcacagaggtcacaaaccagcccgaggtcacacagcaaacgagcaggtgacagagctgggagctcctccccttgtcctcttactcccacccttgacttcaggagcaggtctccctggtgggcttggcagagtcttgacctcgtgcctctctaaggtcaccctcataggccatctgaggcacctgcaggaggcctctgtcagccctgcccatcaccccagctgatggaaccctggggctaagcaggaggggtggcaactccctgggccttgaataaggccctgtcaactgggagggaagctcctgacactctgttgaccttggagatggttcagaggctccagtgagccaatgatgaagccttgtttttgagacagggtctcactctgttgcccaggctggagtgcagtggtgcaatcatggctcactgcagccctgacctcctgggctcaagcgatcctcctgcctcagcacctgagtagctgggactacagttgcgcaccagaacacctggctcatttttgtattttttgtggggacagggtctcactttgttgcccaggctggtctcgaactcctgggctcaagcaatcctcccacatcagcctctcaaagtgctgggattacaggtgtgagccaccacacctggcctacttccttccattttatagacattttacaacaagactcggagacaatcagcaactttcccacagtcgcacatctcagaggggcaaaaacagaccttcaggttatcagggtgtgactgtgactggctctgtgtcctgaggccaattccctgatctccaaaccttggtttcctcatctgcaaaatgggaataatagtagtactgccccacagtgatgttactcttttttcttctcaagacttcttactagatgaaatgaccttgtttattggtctataatctgtcccccactgttaggatgcaagcaggggccttgcctcccccgctcccccactggtccctcccccagagaccaggacggtgttgagtgcatgatgcgtgagtctatgtggagagccagacatggttctgagcatagaggaagtgttcagtcagtgttaactgctattgttttactctgattcccaatcccatgtgttttcatttatttaatcaataaaaatgcattaggtatcctcagcctgccaagtccagttttgatagacacgtaggtgctttgaaaagaaaaaggcaggccaggtgcggtggctcacgcctataatcccagctacttgggaagctgagacaagagactcacttgaacccagggtggggaggttacagtgagctgagatcacgccactgaacttcagcctgggcaacagggcaagactctgaaaaaaaaaaaaaaagaaagaagaaaagaaggaaaggaagaaaggagggagggagggagggagggagggaaggaaggaaggaaggaaggaaggaaggaaggaaggaaggaaggaaggaaggaaggaaggaaaagaaagaggctctgagaacctgccagacaccaccaccaagccctctgccttttccctgccaggttgaaataccagggcttgtgccccgctattcctcactcagaggaagactttgatccaggtgccaagttccacttttctgcaggtgtgccctacatacggtaaaggtctgggccctgttagcagtgccagtcctaggagttgaggggcatgggaactggggtgaggatttgcaggaaggccctaggtccaaatgtcaccctgtacccgtgcccatctcttcctgttgggctgtgcagccttctgaggcctctgacctagaatcctttgagcttttgcatcaggtccagtgtagagggcagagctgatgagaatattctagaccatccctgctgtcccttggaggagagcaggtcagaggggggcaagggttggggtgactgctggttcagaaagctagagaaggagagccccccagcactctagggtcagcccaagactgggccctgcccaaggagcctccgctcaggcagtgactgctgacatggggccctcgtggccactgcatgtcagagctgcctggtcccaagtggctctgagtttcccactcctggtctccactccccagcctgccctcacgtttctcaaccaggtacttcctcagtctggtgctccagttccagttccacgaaacactgtgcaaagcctcgggccacatgggtccactgcaccagtgtgacatctacaactccaagattgccgggaagctcctggggtgagtgccctctccttcatttgttctgggctcccccatctccctttaaggaagtcctgctccaggctccctctccacacctgactacactagacaccttgagcagagcttcattaagcttatattctagcggaatttcttcctcatgtcagactgcagtctttcctacattaatcagagcccatttcctcttgtgtagccttctgtgttcagagacactgcttaggctgggcgcagtggctcatgcatgtaatcccagcactttgggaagtcgaggcaggcggatcacctgagggcaggagtttgaaaccagcctggccaacatagtgaaaccccgtctctaccaaaaatacaaaaattagccgggcgtgatggcaggcacttgtaatcccagctacttgagaggctgaggcaggagaatcacttgaatgtgggaggtggatgttgcagtgagccgagactgcaccattgcactccagcctgggcaacaaggtgaaactccatctcaaaaaaaaaaaaagaaagaaagaaaagacaatgtttagcccctcccactaacacacacacacacacacatgcacacacatatgccagtaagccaaactgtcccagataggaagccagcactggggttctacctcaggcttcagccttccgtccgaatcccccttatcctttccttacaaggtgctgacctaccctctcagcagcacttggcacacccttcagtgcagtctgtttctcccacctcttcttggaggtgcccaaatccagttcccaggctgatccaggttactttcacagtagcctcttggcatgcttctggtcagcctgtggtccactttgacccttgagtctttttctctgcacttggtgtttagcttattctttccatgcttacctatgtggcagtggtttttagtcccaaagcaaaccctgagggagtaggggactgaactgaaaatgtgaagcatttactactacaggaggtgctctctgatgagtactcttacagtgtttcatattataataatagctcttaactttgcaaagtggatattattatctgccttttacaaattatgaaactgaaggcaagagaggtggtgtcgttgtgcatcattcatctagcaagaagcaaagtcatgctttgaaaccagaactgactccagaacacattatctttcaccctgttcgcctccatcattcaaagaatacagcccctggtgagcttagatccaggtctaactggttccaagatcagcactccaaccttggagatgtggagctcacccaccgacttgatcattttcctgttgaatttcaacggatttcaataggtccatttccctaattggtcaaggtcatcttgagctttattcctgtctcctagaggattaacactgccacaaatttagtatcctttgcaaatttaatgagcatatttttgattccaccatgcaatttatctgtagccaccaggccagatggggtttcaggactgatcccctgggctttgctcctagggagggctgcaccttgcatgactgttgtctccctagtagatttgctcttccatcctttcacgtctcagggctttattctagctgattgcccagctttgagcttttctgaacatgttgaacataagggcacctctctgctctttgcattcctatctctggctgcctgtcatttattcattcagtaaacatttacttgtcctcatgcagaccagctgctctgcatccaacaggggtagatgaaccacaggataaataaatttcatggccgggcatggtggctcacacctgtaatcccagcactttgggaggctgaggctggcggatcacctgaggttaggagttcgagaccagcctgcccaacatggaaaaaccccgtctctactaaaaatacaaaaaattagctgagagtggtgatggttgcctgtaatcgcagctacttggaaggctgaggcaggagaattgcttgaacctgggaggcggaggttgcagtgagccgagatcatgccactgcactccagcctgggcgacaagagggaaactccatctcaaataaataaataaataaataagtaaataaataaatttcataataccaggcaatggaaaggggctttcgtgaacatagaaagaggattaggaggtcatgctgggggaccaaggagggagttttgtcctcaaatgcaagtgtgcaagaaatagcagaaagcaggcatggtggctcatacctataacctcaaaactttggaaaagccaagatgggaggatcccttaaacctaggagtttgagaccagagtgggcaacatggttagatcctgtatctacaaaaaatgaacaaaatttggccaggcatggtggcacgcacttgtagtcccaactactcaggaggctgaggtaggaggatcacttaagcctgggaggtcgaggctgcagtgaactgagatcacaccactgtgcttcaccctcggcaacagagcgagacccccgtttaaaaaaaaaaaaaaaaaaggagaagaagaaagagaaaaaaatagcagatatctgttttcttttcttttcttttcctctcttcttttcttttctgtttttgagacagtctcactctgtcacccaggctggactgcggtggtatgatctcgactcactacaacctccacctcctgggatcaagcaattctcgtgcctcagcctccagagtagctgggattacaggcacacaccaccacgcctggttaatttttgcatttttagtagagacggggttctaccatgctggccaggctggtctcgaacgtctggcctcaagggatccacccacctcagcctccaaaagtgctgggattacaggtgtgagccaccacgcctggccaagatatctgttttcttttacatcaactcacctctttcatcccacctgattggtgggatgtttgacctcagtcattttcaccacttcccacgctcaccccactcaaggtgcacagggctctcagggtctgacttggcaccaaagcatgtggccagtgagtcatctcttgtcattgctcaccagtccctgtgtgtccctggccagactcctgctcagggaaaatcctgattccaggcttaggacttcacataccattttgtgagccgtgggcagaggaaaggtttctgagtaaggaggatatcatgacctttgcagatgatgaaatagcagcagagccgaatatggtttgtggaggggagaggggatgtgagtgcttgcagggggaaaagagaaagattcttggctgctcttttgcctaattgatcttaaaacttggttttgctacttttgattcatcctcctaaatgtgatggccctgagtcaggctctgggctgcttctgttgggaatggagggttgaattgggcctggtcaaagttctcaaagtcacccagcttcaccccaccagccatggtgcgcctgaccttgtccatggggtgtgttgttgtcactttggagttgaaagctccaggcagcatctagttgtcatctctgctgctctctggtctcatgtcctgtccacatgggctgttggctgccctttggtcaaacatcttgtcccacccagcctgaaggactgtttctaaatgggtagattctcaatggttgaagcttttcccctactaggttcttcctcttactcaggagccagcatcagaacctcttacctagagttagttgtggtttttcttctccagtggtatctgccaaggccccactgacctttggtttccctaactctttcttttccagttgtttattaagtgatgcgcataagcctttgcaagctacaaaccctccttcatcattgtgggacttagtcctcatcacaatgagggcaggtattcatggctcccattttactgatgaggaaactgaggccgagagaggctaagttgtctgcttaaggttatgcagtccataagtagcactgctaggtcaggtttaagcctgggccctgttagtctagactctagatcgtgacctctgggcctctgggtcccaagtctgtcctgagagttggatcaaggaacaacaggttgtgaaggataaacatctgcccaccactgcctctcctggggactctggagtggagaagcctggagccctggcttcagcacaccttatactcccattgtgagcccaagggacctagcataaagttcaaccacctgcccctaaggaccgggtgtgccgtgaaacacagctgacatttgtgcagcactacaggtggtgtgcggagcacctcccatgctcatgatgtttctaatcctcccaaaccctccctgaaaccagaaaggggtgaagagctgccactatctaccaacaccgagcacctcacgggaaacagtgtctcaggactttatgcctatttgagtccaggagaataataatcatcacagtattaccagtagtactaggaatcatcatcatcatcagtagttaacgtgtattgcctgcatgctatgctcccagcaccgtgtttatttaatcattacaatggctcttcgaggtagataccattatcatctccgttttatggatatggaaactgaggctcagaaaggttacttgcccaaggccccacagctactaaatggcagagctgagattcaaacccagattaatcttctttcaaacttgtgattgtatccactatgccaagctctgcgggaaagttctggctggccaatcgctggggctgggattgggtgcactgggggtctcagctgcaccagctgatgccctcacacagcctcacagctgcacccactcccctagggatgctctaaagctgggctcaagcaagccctggccagaggtcctaaagatgctgactggggagtctgaggtgtctacaaatgtcttcatgacctacttcaaacccctactgacctggctggtgacagaacatgcagcaaggggacatcttaggctggccagacttcagctgttcctttgaaggtttgataatctgaccctggttccagctctgggccagccccaggctccaccttaccctgctctgtcctagtacctacccctacccagccttaacccctggctcattcatgacctggcttgaatcaacagcactgctgctgtgggaccctgtctgtaccaggcctgatgcagcttcagccaagaccaccgctcccaccacagcccctggctcagttgcttccttgcacactgtccagctaggttgccaggctgacatctgagcaaaggatcagcatcttgcctctggtcccttgcatgcaggggcatgtagtccaatcagatctcctctgacagccacaggagaccccaggggtccctctccagttctacccaccctatgagactcctatgtcttccacagaaaaagacacagacaaagtgacattcctgagtctgaagctggaccccaaccaggctaaatttgggtactgggtgctgttggccctgggctttgtcatgtctctggtggtgctggggctggcctgcaggctgcagtccctggaaaaacagtcactgactcaagacactgagatattcagcccactgcccaatgcctgcttcctgggcatagccatggaaccctgccaggctgctaaaggacagtggatgctgctgggcctctgccttgtcctgatgctgtgctcaatcagcctggccatctggattttcacacagtaaagcaggaagcctccaagggtaagagctgaatggtgaagttgggactagacaccagtgaactggtgaggctggggggcaggaggagggaggctgagccagagagttggggggcagaggaggggacagcctgcatgcatagtgcccaattataattgggttcagctgtggcagatctgggtacatgtgatattgtaattgtgtgtttgcaaactcatgtatgtgaggctgtgtgcacaaacaactggctctatgtgattctatgtgtgtcctgggtttcaggccaaactccttcccctggtggctcaggacctaaggttttattgacccagtggctgtgtccctgcaaaccagcccccaccccaagtcatgcccagaattggttctgcacacagccttgtttttttcagtaacccggctatgggactgcagtgcccaaggaatttctgctctggttagaaaaaggactctgcttcagtccacttctgctctggttagaaaaaggactctgcttcagtccacagtacataaaatgtactcaggtaggacaggacattcctttacgaatcaccagtgcccagtttatgagcactgtgcttttataccaaccagcacatctttctgctaatccttgggccagccctgtgttggactacataatccagcccccaaaagctctttgttgaccagttgagatgtaagtagcctcacaaactgccccatggctctctctgccccagcccaagcccttccaaatggagacagtgggttgctgggcattgagccaggcttgattaatgattgacttctttaatatttaaacaaagctcatctccaaccactctgctctggagatggccttgttcaacacacacacacctgctgcctggcccgttgccctggggagcgagcataggacaaacagcaccttttcaggctcagtgggggatggggaggacaggaaggagggaactgtaggagaatacttgggaaattagtgctctagaaacaagcctggggaaagaacgggaaggcctctgcctctgcctttcctagttcattatcctcagcctgggtctgcctgccatgaggatcctacattcaatattggggattcagagcgtctggatggaggttgcatgggctcctggggaggctgggagtcagtgtctgtcagagaatagggaaaacttgaggggaaagggcattatagccagtaactacagagaaggggtaccccggctgcaactgagctggtgggagggtggccaaaagaggagaccaggtctctctgaattaagaatctgagccccaaactcaggtgttcaggggacagagatactaggctgagatctccatggaccctgcccctgtccaggtttcaaaaggtctttctgagatctggctgagcccaagcacttgctccagccccaggctccacagcacccttgtttgatgactctgtccctgctcttacttttctgtgccataatgtccttatttgtccctattactagctatcagctctataagagctggatgcacatcaggagtgtgcccctctgtaacaactctagtcagcacaggccatggtgcacaaaagggacttggaaaatgatggaatgagtaagtgaatgaatgaatgaatgaatgtcccactgcccaagtccctcctcagagctcagcaccccatgtactgagctcatgagaaatagccccttcttttcctccacagccagcctgtccaacagaggggcagccaggacatctctgccctcttctcatcccccagccacagtggccaaagaggcccccactaggcactgtggctctgcatgacaaacacacatccagcccaggactctaagcctctcacctggactccagtaaaaaccttgctgagcctccttgtctatccttcctcccccacccaccattgtaaagtttatgtcaccagaatatttctttcatgtctaattgcttaagaacttggttgttcatcaattaaatctagatgttcaaaatggcatctgagggtctttattaattacctccttcctccaaactcacctctcccacacccccttgttccccccaccccagcccctctgcactgacatcacctttggcctttgcctaaggtgcatgccccatttgaatgcttgccctccaagatcaggctcaaaattgctcaccaaaccctctgcagcactacaagcccacccagatgctcagtgaacagtagtccccttctccccttcctctccaggaagcctctttcaataaacctattcccacccccatttgctttttctagtgtgttcattttcagtcagtactcagtactcagacacttttatcagtggtcacttgctaataggtggttttaaatctgttctccttccaagatgtacctgtatgctaagagctctcaggcctctgaagaaggcatcttattgcatacttctttctttctttctttttattttcagatggagtctcgcgtctcgctctgtctaccaggctggagtacagtggcgcaatctcggctcactgcaacctccgcctcccgggtacaagcgattctcccacttcagcctcccaagtagctgggattataggtttgcgccaccactcagctaatttttgttttttcagtagagacagggcttcgccatgttggccaggctggtctcaaactcctgacctcaggtaatctgcccacctctgcctcccaaagtgctgggattacaggcgtgagccaccgcgcctggcccttattgcatatttcttgcacgtcttcatgtgtactcctaccccctcctctcaggaccaggccctggctggacttggcggcaggagctctgcatgggacctaggtctcagctgagctggagatcacttgctataagagcaggccagaggcctaatggtatcattgccagggtcgggcccagtggtcagacccggaagaaagctttcagccaaagaccacctgaggcccctaacaaccccatctgtagcccccctcctgcctgggaaactccctgcactgggaggggagactgccctttggtactgggagggaatcggagaggtgctgaggccattggcccttaggacaggaacagaagcagctcctcagagaacacctgccctattccagggccaggaccccagccccgccccgccccgccccgccccgccccgtaggatgcaaggccccgccccagccccgtcgggtcccagagaaactgccccgcccagcggccccctccccgccgccggcgcgcggcttctttcagcaccaaggcgtggacagctcccgggccggcgcagaggagaggaggccaggagggcgcgggccagggaggcgaggggagggcaggggagcgcaggaaaggaaaggagaggtggggcaggggtggggaggggagggcagacgcaggctggcgggcggggcgcggagcccggcggccctccccgggggcggcgcccaccggagccggacgctgctgagcccgaggacagacggagacgccgggagccagtggcgcctgtggctccgggcaggggccgcggccgaaagatgccggtccgcaggggccacgtcgctccccaaaacacttacctggacaccatcatccgcaagttcgagggccaaagtgagtgtgtgtatgttggggcggggggacgatctggagtcctggttccgtgaaagggggggctggacccctttactaacttctaaccgggcaaggtggtgagtgccgggtgctgaatgaaaaatccttcttttgatgtccccaacaccttctcctccagggggacccgcttgccttaaatgctgtcctcttttctggaacacaaggagcagcgtgcaggccttccctccctactgccagctgtttccttggtgccccaagttcgaacctccccttccagccactgcctgccccctcatccgcgtcctccagaggcttctctgagtccttcttttccttccttttcatatcctggttctggtcttcccaggagctttcccaggcctgacccccatctggtcacatccctgcctcccttccccacacttttcctgtttccaggaggccttgggccttccttccacctcaagaccctcactgccctagtcttcccacaatccccaggcctgactccctccctcattccggtcactgccctgctcctctgcctaaattccccttactgccaccaagagtccttatgatctttccctcccagccgctggatcctggctcccatggactttttgcctcccacctcccaccccaggtcggaagttcctgattgccaatgctcagatggagaactgcgccatcatttactgcaacgacggcttctgcgaactcttcggctactcccgagtggaggtgatgcagcaaccctgcacctgcgacttcctcacaggccccaacacaccaagcagcgccgtgtcccgcctagcgcaggccctgctgggggctgaggagtgcaaggtggacatcctctactaccgcaaggatggtgaggcatactcaggccagaggctttgcagggcaggcttggccctctgtcttgtccagccagggtggccttggggaaggcactgacccagggtccaaagggcctgaacaaaccctgtttcttctaggggccttggttcctccacaggcattggatatgatgccttctgaggtcctttgcaggagctagggatcaggctgggccacccactggttctggcctggggcagggcctcctgctctgccatccctctgctgtgtccctggtctcctggctctccactatcttactgtcagccccagcggtcaggcagctgggatggaaattaaccttccctcctctccgtctgctccaaggattagaggaggagtcacctcctgaagacctctgtggccaggcaaggcatgggggcttttggctggcaaagtggggtgggcctgccttatccagtctcagctctttggggagacagggtctggagttttccctgaccaagaagctcattcagatggagtttgggttgttactgccagctggagcatactgcaagcagaacagaagcgtaagtcaggagctgaagacagatctcagcagcccttggaaatcctcccccaccccccaggaccacagggtcctcactggacctggcagcatgggtgggaacgaggaaaagagcctgaatgtcctgggaaatctcttgaatcaatggcccccaacctggttctgcatcagaattacccagagcatgttttccaaaacatgctttctctacagagaggctgactcagaaggtgtgagatgaggccaagcgggtgtatttggaaatatctccctggtggttctgatgtcctgcttactttaggaaccactggcttaggtaaatcccttcatttcatagatgtggaagggatttgcccaagatcccactgctagagtccaacctgggactggaacccaagtctctggattcctccctcggagatttcttttgagtaatcccaagaggagagaaaggaccccagctgcctttgtgtttacaggcaggatttctggggaaggaggtgctcaggggagagaagtccccagggaaggcaggcatgaggccacctgagtggagataaagaatggatgtctctggatcgggaccgaggagtgctgagagaccaggtttcaggggcctggagtgtgtgaaacatgagcatgtgtgtgcttgcatgtgtgtgcctctgtgtgtgagtgtgtgcttgcaagttcacgcctgtgtgtgtgtgtttgcaggcttctcagagttacagcttctcgggtaggtcctggttgttcctgctgctgccacttgagtgagtggcagtgggaagtgcaacaggcagcggcagccaggaagggactgggaagaatctggcttagtgtggcagtactcacagggttaatgaactcagaatatttttaaaagctgtgacctcacctcctcacatcattgcagaggagaggtggcagtcaggggagtgagaagggtcctggggaacaggatgggacagcaggaaatgggggttacagcaggtcctttcttttcctctccttgacactagagctatacctgatcccagattcctagggatgtcaggtgatggctcttgaggtcccctcagcaccctgaaggtgtctgggcagagggcagaagtcaaagcctggccttggccccctgagatcaggactcagatcagaatcctgtgggagtcctcaggtctcagaagggaacctaggaaccttgtcttgggggctgaccctcggtgaaaatgggaaattgcccacatacctggtgccccataagtcccaatctactcccatcccaccctcggcccttccctatcttattgcccaaggctttgatttacctggaccttcctgaaattgtcctgaaacccagaaaggggagcttcctggcctgcattacactaagggaaggatattgtgctcagataactgatgttcaccttaaggtccactctgacctcatataatcctttttttttttttttttttgagacagggtcttgctctgtcacgcaggctggcaagaacatagctcactgcagcctcccatcccagcctcctgagtagctgagactacaggcgcgcaccctcacacccgactaattttttaattttttgtagggatgggggtctcactatgttgcccaggctggcacatgatccatttttgaccatattcatgtacacttacagtcctgctgaggggcatcctaatggtgatttctttcctcctcgggtcagtacctcccttccccccaacccccaactccagggaggtgggaaggggtcctgagcagatctctagctgatttatgtataatcctcttttcctctaaaggggtaatccactgaaaattctcgaagtcaaagtggagggtttgtgttcacatagctccacgttgtgcagctacagacatttgggctcaaagaggccagggcacttggcaaaaataccccgggagacatctcagagacccctgggaaactggctcttcctctatttgcctttgctaggagtggtgagaacctaacagataaggaggaatggggatgtggcaggactagaactggtgagagtttggcaggaagaaaggagagcactcagatccccccactgtcacccacgcctgccccgcactggcacctgcccgggagcccaccccagcctgcctttcctgggtcctcttctctgaggatcccgaaccagagagtcccctaatccccaagccagatcagaggagtcctgggacttctccagtcctcagctcttgatgaggaggatgggacaaggggctgctgtctgcccccaccctcctcccatgtttaccatatgcacatctgtgaatgccaggaggaccaagctaggaggcagcatgcagcggccaccctctcagtggcagctttttggctttttgtagcaccagcctctccctggggactcaccacagtgctggatggggtgtgcatcgggagacagaggtgaagacaacaaggaggttgtgagtgctgggaaactgaacgaaggagcacattcaagagggagagaagaggagagagaattggggtctcccaggggagagaagtggggtgcctttgctaagaaaagtaagaacctagcatataagaaggaatgggaattcccagggggcagacaaacctgctgcccttggtcagaaaggtgggtgctgggaggagctcctgcaaggaagaagcaggcagagactgtggctcctcctccagggccctggtgagggcacaggaacaccatccctcctgggcataacctgagatggtacagttacccacttttggtcacctagatgtgggcttttgttgtgtgggggctctgagccacgggtaagcaaggacaacctggggcagggggagagagaatgctctggactcttccaaatcctcctagcctcctgtctgcctacccaacaggccacaggcatgggggcagggcatggggtaccacgcactggcaccccaccccagccccagacctcactgctataacgggctggtctttggtccattcccagccgcagttttccaattgcatcaattttccagtaacatcaattgctgggtgcagccacgccaagactgtgtattgacagcccccagcagcttagagagccctggaggccttctgcccctctgcccagctctgccctctccctgccccctgccaggacagatctctgcagtgccagagagattgacaatataatctggccttaggagcagtgtccgaggccactggccaaggaggctccctgtctaggtcccagcgtccacgtgtcaccatgccccaggctgactggagttatgggcttgggcctgggagtctgggcctatagcactatgtgcccaggagtgggtgaagcaggcaggcgcctctccccagtgtgggtgtctcccctgggcccaggcagcagatggtagatggctgcctggtgcctgggagtccagaaatccaatacgagagattcctactccccagggaggaaagcgagagggaggatatgggtggctcagctgcaccccagctctgatggctgtgaggaggggctgaggacgaaacaaggagtctggtggagagtcattccagtgagctccacagcagtgatactcccaccagcggccggcctgcgtcccccacacgtgggcttccatacattcagtcaacaaacaacacctgggacaggtgaaacagagcctaacctgccctcagggagtgcagctctgccttctcatctgcgtggtcacctgaggcccctgccccctgaggatcctgccctttgggcctgacatctgccaacagtttgagttgagggacataggactcccatggagagggtgctcgtggggtgcctggcctggggctcttgggtatggggtattttgtttgtttgtttgtttgtttgagacagagtctcgctctgtcacccaggctggagtgcagtggcatgatcttggttcactgcaaccttggcctcctgggttcaagcgattctcctgcctcagcctcctgagtagctgggactacaggtgcgcaccaccacgcctggctaatttttgtatttttagtacagacggggtttcaccatgttggccaggctggtcttgaattcctggcctcaagtgattcgcctgcctcagcctcccaaagtgctgggattacaggcatgagccaccacgcccggccaggcatggggcattttagctggtattgttccatccaccaaagggggctgcagccagaccctggaggggcagagtctacgacctgagaggcacagagcagccagccgctgggtgtgggctgcccaagataatggggaaggtggccagaggggcctgccctgcccccacagggccatcctcctccctctgtggtgcccaggccactactctgcctgctccctgggcccagccctgccttgggaccccacactcctcctaggcccagagcagcagcctggttctggccccagcactctcctcccaaacaagtcccttcccttttccaagctattgtgtcctgcaaacccagggatcctctctccatgctccctcccagcccttgaaagtcagtttctgagaacctcaggctctcttctgcagaatgggggtccatgcctgccccccaaggacctcctgaggccaaatgttccaactggccccatgcccagcacttagtgtactttcaacaacaaattcctccctgcatcacaggagcagggcatctttgcaggatgggaatatgggaagagcgcccagggccaacccagctccatggggtagaatgcccagcctcacctccccacttaatccacccccatctgctcagctttaattacagcagaagcagacctcgaggttaagctctgagctgatggccgagcgtggacttgggcctgatctgatgctaccttatctcctaataagcagcttaaccgctctccccacctctgccctgtgggtggagcaccagctgagcagcctcacccaccctctgcccagtatctctggtcactgtccaagcctcttcacccgtggctgcccttcacttgaccttcactcagccccttccctagccaggccactgcaggaggggaccccttcagggcccaccccccatcctcccaatggtgttcgcagcctccagcttccgctgcctggtagatgtggtgcccgtgaagaacgaggacggggctgtcatcatgttcattctcaacttcgaggacctggcccagctcctggccaagtgcagcagccgcagcttgtcccagcgcctgttgtcccagagcttcctgggctccggtgaggcagagtgagggtggtggtgggagggacgcatgagggtcccctggccgtggctgctctgactcctggccctggtttcagagggctctcatggcaggccaggcggaccagggccaggcacaggcaggggcaagtacaggaccatcagccagatcccacagttcacgctcaacttcgtggagttcaacttggagaagcaccgctccagctccaccacggagattgagatcatcgcgccccataaggtggtggagcggacacagaacgtcactgagaaggtcacccaggtgcgggcctgcagagcagggtgtgcagagctgtgccaggcctccagggtcccctcccaggctctgggcccaggcccttctggggccttggccgataaagagatcctgcctgtccagcctctaatatctggtttgagccccgggcctcctgtcctgtttgagacctaaagacctgaaggcctgccctgaggtcacagcccttgtgcccagctcctagagccagaggaggctggggtcagtagggcctgtgaatgatgccacctcctaggcctggagaagccagggcaggggatggacatggaggccaccatgggggcctgaccaaggctcagcccgtcacagggaaggagaggcagagaggagacatgccaaggccatactgagaggagagctggtgtgggggggggtcccagccctgtgccagccctttgcctttgagacaaaagccaccctccctacttccttccaatgtgaacacaggatcctcctgcatgccaggcagggcaggatgaggctggcacctccagctatctttaatcagcttcctgggggccaggccctgaaggaccccggcagctcctccttggccaccccaaggcaggcttccctgggttctctgctccagctcaccctgctgtcccttctcatgaggccggaagccctgaccattccagagggaaatgcgaggagccctgcccgaggctccagtgaccacagtcctggcactgactccctgtgtgaccttggccaggggaactatcagccccctttctaggcctcagggctttcatctgcaggagagagatggactaaatggtctctggggacccatttgacattgagtagttctggccccaggaggcagacaaagctgtaagtcatagccaggggcccaggccaaggttgagcaatgcagagcatggaggggcctgctcccagctttcctggggctgtccctgtgttggggctggaggcagctcttttccccctgcctgttttcacctaaagcacagttgctgctggaaccaggtgtggggaagaccactcagcacctcactgacctcaaggatcctgaggagggtgggacgccaggctgcaggactgtgtcctctgaggtcaggcagagtggcccaaaggcctgaccctgggaagccccccagctgcttactccaggacatcttaggttgatgccactgttggtggctaccacggagggggctgttagactggagagtggtcggtaaagacagccaggcctggctgggcccatagtcccggcacctgcccaacctgcctacccgtttgttcctcagcttggcccctcttggtgtcactcccctgctccatgtgggtcctaggtccagggaggtgcctgacagatctcaggggaaagagcaggcgaggacccagatcagggaagtcacatcggcctcaaccagaacttaaagagcctcgatggctgtggcctcacactggagcctgggcatcctgagggccttgcagctctgggggacactgggcagggtgggctttgccacgaagagcctcgagctggctttggaggcagtgggagattttgggggtccccctgtctgggggccctgagaagctgaggaactctattctcagcctactttaaaccaccccccaccattccttctgtctccctcccactccccacccaggcaggcctagggaagggccttgtttcaccctagcagggtcctagcagccctcaggaggaggaggagcagctctgatgcccagggtgtgacggcagctgctcctgatcagagccccagtttgcagtgctcattcaaggacctgcagttgagagcccatgtggaccaagagctgggcacacagcggggagagggccagtgagggagccaaactcagtgagcccatggctcagtggagcaccaccatgcagctaggtggatacaggggcagggagaaaataaaaaaagagcccaagtctatgtggagtcggagggggcttcctggggaagtacgaggtgaggcctcaaggctgagcaggtcactgcagggtggggacatggtagccccactcaagggtttggatgtcagatagggaccctctggttgaaactaaatggatctgccttactgtgatcccatctgctaattgatttggtttgcaaggtcaaaccttacattgcaaattttcctaaatcagaactatccaccagatctcatctggtgggagaggaggtccatggaacacccctccggctccatccttgtctggagcagtgtctgatgaggctgagggaggaggagggtggacagggaattactgtgtagagcagcacctgccatctccatgagaatagatggatctcactaactacatgagaagagatgcatctcatttcctcactacccatggcttttgttgtcctttgtgattccattttgcagatgagggaactgaggctcacagaggttacaaaacttgcccaaggctcacctatagcacatgtcagacctgggattcaaccggggaggcctggcttcagtacccatgcccttcctaatgccctggctgtctctcatgttgggcagctgggcagagccagggcatgttgtgctgggacctagagatcctgggttgatcacagtcttggaggcgggggcgggaggggagaagggagaagggaaggctctgcagaaggtgatgattccaaacccttggagatgtggggaggagtcagttttccttggtgcccaggacccgttgagggtccaggttggctacacccctaccccatggactctttccatgggaggctctgagttggcctcagagagggcactcactggtcctggatccccagggccctcagaaaggaagacattcttctaggggtgacctgttcccatcaggaaccctgaccatagggagcctcctaagctcaccagagaggatcagcccatcagctaccccttctgtgggctcttgtgtggaatgggtctatagatgtccatgggcctggccctcccctgcctggctccacccactccaggatgtttccaagggagcttgtgagcatcaaacctggtgtcgctatggggcggagccatacccctcctcttgcatcccaactcctttctctgcacttcctctcgaggcatctgtccccttaggaacttgccttctcagacaccccccaccccatctctccctcatcccctctgcccaccagagccgtggtcacccaccctctcccactacaccttccccaggcctcagccctctaggccagtctcaccagcagtggctgccccgtgcctgacctccctcggcccccacccccaggtcctgtccctgggcgcggatgtgctgccggagtacaagctgcaggcgccgcgcatccaccgctggaccatcctgcactacagccccttcaaggccgtgtgggactggctcatcctgctgctggtcatctacacggctgtcttcacgccctactcagccgccttcctgctcagcgatcaggacgaatcacggcgtggggcctgcagctatacctgcagtcccctcactgtggtggatctcatcgtggacatcatgttcgtcgtggacatcgtcatcaacttccgcaccacctatgtcaacaccaatgatgaggtggtcagccacccccgccgcatcgccgtccactacttcaagggctggttcctcattgacatggtggccgccatccctttcgacctcctgatcttccgcactggctccgatgaggtgagcagaccccctccaggccagcagccatggctgtcctctgcacgctggcctcaagccctccctgctgcacagcactgggtgcggagagtatctggcactgggcacctttgctgaagcacgtggaggtggagaggaggccccaaacatctgtcacctcccagccctggagaaggacctgccaaggctgcacccccaggcctctgtccctctgccccctctctgagcaggccctggtaagaggagcaggctgccccttccaggatgggcactcgtgtggtcccggcccctcatgctgacttccaaactgcactcaccctggaggaagaaagggatccccaggccactcccccagtgcaccctggctcccaccttgctccctagccctccactatgtccacctggctgcccataggtgacgtgaaggcatctacatgcctttctcatagcttccagtcccacggtctcctcttgccccctctcctcacgatcagcttttcactgaaatcaactctgccttctgtgttccagtgcccccttatcaccccagcctgtccagcagggggtgtccagcagggctcctctgctccaaagccccctaagaccacccctcaacaaatccaccctcctaccttgctgcccccacctggacactgagtggccttcgtactcacttgtgtcccatcaccaaacttgccagtctcccgcccctccacacagctgccacagcgactttcagatcgcctacctgaccctgtgttccaccctctggggtgtacagggtcctcagaattttcagtggcttcccaaggcctacagactagaagccaagttcatgatggaccctgaagcccacaggcagcagcccctgcccgccctgcccttcccaggcacggctctcactgctcctccatctcccatgtgcgcatcgggctgcagtgccacactcggtttcccacatcggccacgcacttcacacctcagtgccgctgctcatgctgctccctgagccaggagtgccctttccctctctctcctgtctgtctggagccctagcctcctctctccaggctcagctcatgcgtcacctcatccatgaagcctcccctgacctccccttcctctgttctcccactggacttctgtcctagcaaccagaacactattctgagctttaggctgagatcctcaatgtcccatactgtgccacactgccaagtgcgtggcccggaggaagttctccataaatgtttgttgaatgagtatgtggttgtatgcatgagtgaacaaaagcaggcctgactgcacccttccaagggctgaccccagccctgtgaccatttccctacccctccagaccacaaccctgattgggctattgaagacagcgcggctgctgcggctggtgcgcgtagcacggaagctggaccgctactctgagtatggggcggctgtgctcttcttgctcatgtgcaccttcgcgctcatagcgcactggctggcctgcatctggtacgccatcggcaatgtggagcggccctacctagaacacaagatcggctggctggacagcctgggtgtgcagcttggcaagcgctacaacggcagcgacccagcctcgggcccctcggtgcaggacaagtatgtcacagccctctacttcaccttcagcagcctcaccagcgtgggcttcggcaatgtctcgcccaacaccaactccgagaaggtcttctccatctgcgtcatgctcatcggctgtgagtgagacctcatgccacggcctaacttcatgctctggtcttacccgtgaaattttatgtgtagttttgtactgagatagaacataacacatagcaacaattcatgcagtacactgatcctaagtgtgcagcacaatgaatttttgctggtgtgtgcaccaagtgtatacaatatttaacacccacacagcccatgctatctgccaggcaccaagacaggctacataatttgcagagcccagagcaaaatgaaattgtagggacccttgtttaaaaattattaagaatcggccagatgctgtggctcaaggctgtaatcccagcactccaggacaccaaggtgggtgggtcacccgaggtcaagagttcaagactagcctggccaatatggtgaaaccccatttttactaaaaaatacaaaaattagccaggtgtggtggcacatgcctataatcccagctactcgggaggctgaggcaggagaatcagttgaacctgggaggtggaggttgcagtgagccaagatcgtgccactgcacttcagcttaggtgacagagtgagactccgtctcaaaaaagaaaaaaaaattattaagaatttttcgccaggcatggtggctcactcctgtaatcccagcactttgggaggccgaggtgggcggatcatgaggtcaggagttcaagaccagcctgaccaacatggtgaaaccctgtctctactaaaaatacaaaaattagccggcgtggtggtacacacctgtaatcccagctactcaggaggctgaggcaggagaattgcttgaacctgggaggtggagcttgcatgagccgagatcacaccactgcactccagcctgggagacagagcaagactccgtctcaaaaaaaaaaaaaaaaaaaaaaaaagaatttttcgacagtgacagcagagtattaaaccaaatgcagggctcttagcatgcggctccgtgtgtccacatgggttgtacacatgaagccagctctgccaggcactcttttaaacactttacaaaagcccacatttcattcccttctgagcctggtttacaaagcaagaacccaggtagtgctaaagtgccagagggcacacagctaggaaatgtccgagtgactcaatcccagcccaggggttcagctccaaggctgtgctgttctcaatccctgctcccagctgcctgcctcccaagacacctggtttaggaaaacaagagtcagcgtggaattttacacatagattgagttgtgatgttcagagtatttagagatatgaaagtccagaaaaacaaaaacaagggaagaaaatgggtgaaaacaagaaattgagagtttgctcttttttgttgttgtgggtttttttgttttgagacagtctcattctgtcgcccaggctggagctcagtggcatggtcttggctcactgcaacctctgcctcctgggttcaagcgattctcatgcctcagcctcccgagtagctgggattacagacgggcatcaccatgcccggctaatttttctatttttttggtacagacggggtttcaccatgttgtctgggttggtctcgaactcctgacctcaggtgatctgcccacctcggcctcccaaagtgctgggattacaggcctgagccaccacacccggcggagagttttatctttattgtatttttacaacttaaaggagaaaacagatctgaactttaaaaatccattgccttccttctttcttctcgggagtttgaccgctaggcccagtaagatgccaagaggcacaggacagagggaggagggcagaaagcccaggggcctttgtcccgcatgtgccctggcgctgtcctggtcactcctgacttctccctggacagaggggtccttcaccagggggctgctggaaggaggaagacctgggtaagcccttggtggtgtggcccagtggggccgcggaggagctcactctccgccccgcccccagccctgatgtacgccagcatcttcgggaacgtgtccgcgatcatccagcgcctgtactcgggcaccgcgcgctaccacacgcagatgctgcgtgtcaaggagttcatccgcttccaccagatccccaacccactgcgccagcgcctggaggagtatttccagcacgcctggtcctacaccaatggcattgacatgaacgcggtgagccccgccgctccggctaatgccccgggcgtgggggggagccaagatcctgcgggggcggggcgtccccagagccctcaccaccctctcccccagccccaccccggccgcgtcccgctggacttggccgcccgccttgcaggtgctgaagggcttccccgagtgcctgcaggctgacatctgcctgcacctgcaccgcgcactgctgcagcactgcccagctttcagcggcgccggcaagggctgcctgcgcgcgctagccgtcaagttcaagaccacccacgcgccgcctggggacacgctggtgcacctcggcgacgtgctctccaccctctacttcatctcccgaggctccatcgagatcctgcgcgacgacgtggtcgtggccatcctaggtgggtccggcggagtggaccaggcctgtgttggggattggatggaagagggcgggattggagatgccctgcccaggccaccctcttcctgatgaggattttacttttactggcagccacttgcacagcatgtgcccgggagagctttagacccagctggctgaatccttaaaacaaccctctgccggaggtcccattttcctgagagggaagttgaggctgagggagatcatgctagtctgtggccaggcagggattccagggctgccagtgtgactcagaagcccaggcaggtcttcctaccttcttgcactcttggggagtttagggagaaaggccaagggtctttctgggtggaggtggatgccctggctggggaccccagtctcattcagtgcagacacagggatagctagacactttggaggaaggacatgagcactgggcaggggggacagacaggtcacaagcagcctctgtcacatacctgctgtgtgaccttgggcaagtcactttgcctctctgagcatcacagggtcctcttgattctcatcttccttgcctgccccatgacttcatctccaccccaacttcagcctcgccctcctttggtacccatgacctggctatcctccagcccctctggacaggttcccctcgggcagccctccccctctgcttcctctggactgctggtgatctgctctcctcgcccctcctcacctgacaccctcccctgggcctgctcctcgctcccacggcttcagccttcacctgtgccacaaggagccctgtcctcaccccactgtctccttagaccagaatattccatttcttcctgggcatggccgccctagtattctatgaacagatcaaactcaatgtatcccaacctgaaatcacctttcctcaaaaccagctgcttcagcatccccatcactgtgaagcatctgcctattgcccacgccacagtctgccaagggggcatcctacttcattcctgcccactgtccaccagccagacttgtccatacctctccatctcacacctgtctccctgtccctgcctggatccagccctctttgggtccttcctggaaaggtgttgggaactcctttcccatggccctgcgtctggtttactcccatgcctgtcttccaccttctgccagtgacctgaaatagacatctgtacatctgcctcttctgctcaagatccctccacagttccccatggtccatgcatggcatccccagttatcccaatccgaccaccctgtcctaccaccctccccctggtacttcatgctccagccaaactacttagagttctctaaatctgtgcccttgcatgtgctgccattctgcctggagcgccctaccctgtgccagtccggcagatcccagttgtcctccaaggctgggcttaggcacaggtttctgtatgagaccttccctcactcccagcctaccttagacgtgccatccatggccaggcacggtggctcatgcctgtaatcccagcactttgggaggccgaggtgggtgatcacaaggtcaggagttcaagaccaacctggccaagatgatgaaaccccatccctactagaaatacaaaaaattagcccggcatggtggcgggtgcctgtaatcccagctacttgggaggctgaggcagagaattgcttgaacccaggaggtggaaattgcagtaaaccaagatcacgccactgtactccagcctgggtggcagagcgagactctgtctttaaaaaaaaaaagtgccatcacatgggagggatgattattattattaataattaagaagttaatccaatttaagtttcagttagagacatgaaacctctcattttgtcctgagtagaaaaagacactagatcagaatctttcatctactggaaaaccatcacattataatgttgcccagatttcaagcttcagggtttcatgtgtgaccctggcaagccgcttccctctccaggcctcagccccctcctttgtgaataccctttgatcctgttctcttgtggggacatgtctcagcctccacccatccttctgtgctaaactgttactgccacttgcactaacaagtggactttctgggggagtgggaatcaaagcagtcatgctccgtggcaccccggccctgggctctccacccctgagccctgacagtgcagtgctgatcacatgctgtttcttctgtcctgactgcctttctcatgggggctggtccttgtttctctcgacacagcccccacttcacttcctctgtaagccccctcctctctgccccagccacccctggcaggaggagcccctccctcctccatggccccataactcttggttcttcctgtttctagggctctacagatcatgctgtaaacttgttggctgcttacgtacctatcttgcagggatttgggagggtccttgtgggtggcacaacatcttatatttatatcctttggccagcacagcacctggcaccaggagggcccagtacccttgccacataccacatacctgaacatcacccatgtctaccctgggatattcccccttgccttgcatggacctagtcaggtgcctcttgcttttttttttttttttttttgagatggagtctcgctctgtcacccaggctggagtacagtggtgtgatctcagctccctgcaaactctgcctcccgggttcaagtgattcttctgcctcagcctcccgagtagctgggattacaggccaccatgccctgctaatttttgtttttgctgttgttgtttttagtagagatgcggtttcaccgtgttggccagactggtctcgaaccgacctcaaataatccactaccctcagcctcccaaagtgctgggattacaggcgtgagccgctgagccctgctgcctgttgctttttgagtcactttctcaagcatcacctcatctgcttccctgaacagtccagtggggttggcaaggcagatcaggttttatccattttagagatgaagactctggggtctagacagggggagtaacttccccaagcttccttcaccagggccatgctggttacctggccccacaattgggagtgggaagacagagaagcctctggccctgccctggcggagttaggtgctctggccctgggttccctgcaccctgctccacagcactggcaggccaagcagcaggaagacgttgagacagatgttgagcctttagggccccttcctgcccactgtgccaaagagtatgggctacaggagggagattctgatggagggtggttctgaagggcctggagacagtgagaggagccacacgccggatctctgtgccgctcaaaggacacaggaagagaacagccccacccctaccctgccacccacagccagcacatccagccatgtccccagagctctatcccaggcagcaggccccggcctagaaggatgtccgaggttgggggaggtcacggtcaaaggaccctcataagggagcatggagtcagaccctgaagagactcccacccctctggctggcaggaaagaatgacatctttggggaacccgtcagcctccatgcccagccaggcaagtccagtgcagacgtgcgggctctgacctactgcgacctgcacaagatccagcgggcagatctgctggaggtgctggacatgtacccggcctttgcggagagcttctggagtaagctggaggtcaccttcaacctgcgggacgtgagtcagggccaggtgggccagggtgggtggaaatgcccaggcagcctgcctggcctgagggcacccatctgaccaacacccttcctttcaaccccatcctgcaacctttgccataatttcttttgtgcctaccatggctggcgtcatgctaagtatgaggatagctactatttattaagcagtagggtgctaagggtggggcttcttttacatgatcttcttgcaaatggtattattatccccaattttcagatgaggaaactgaggattagagacaataaataaattggccaaagccattcagctagtcaacggcagagccaaaatgtgaatttaatttgtctgactccaaagcccaggcattcctactacatcataccaagctgaaaaagggggtgccttctgtccagagggctcacagtgccagacacaggggctgccaagaggtgacaaagctgtctcttctcatgctcatccctcagtagaggagattttgacaactcaagaaaaataaagagccacaaagtaaaacagccaaagtcacgaaggtataaaggagaagccatgtggagctcaagcttgctaaggagtgggacagccaggaccgacctgggaatgcccagagcggggtatcacggaggaggaaactaatgggaagaagggagtgtgcatctggcagggaaacacagagcccgggctatttcttccctggtgccccgcccctccaccttgggggagggccctgctggcgtaggccctgtgcccagcttcctgagcatagagctgggtgggctttctggctgtggacagccctccccacaccatcccctctccccctcctcagtttctcccctccctcccgcgatctgcacaggagactgacaggttaggactctgccctcggcccccagccatcaggtggccagaatgcccagcagctgggcaccaggacaggaggggtgtggtctctgcagcctgggccacctgcaggaagtcgtccagggcatcgctgctgtgcccagctgcttgtcattctttcacctagttgtgacagcaccatggggtcagggcagggaagaacaaagaggccccatcccagctttggttcctgttatttcaccctcttgcttcccataaggcagccgggggtctccactcatccccccgacaggctcctggcagccaagaccaccaaggtttctttctcagtgacaaccagtcaggtgagcaaagccagcccccacccccaccagcctgtagcccctgcccagcctcctacccctcccatgtcctctccatcctgcctccccagcgccaccccactccatgagtggagaggggctccctctctagacccagagctggagccttggccctccttcctccccagtctcccagtcctgatggtctgtgtcctcagaggcagagtgagggctctgtggttcaaatgcaacccccaggggtgtatggagactagccagccccctgaggttccacaccaaggcatcaggggggccactgggctgcagctccctgggcagtgaaaccagtgctaaaagtcctcaccctgccagggtctccccatgagctggggccccagttcccctctaagggctacagcctcctgggtcctgggagccagaactccatgggggcaggaccttgtgctccagggcacccaggtaaggagagccactcctcacaccctgtgtccccagggcaggtagggggtgggggacaggctctattgagaagggtcaggcctgtggaaccagctaggcccagctgagacttccctttccctcctgcagatgcagcccctcccctgagcatctcagatgcatctggcctctggcctgagctactgcaggaaatgcccccaaggcacagcccccaaagccctcaggaagacccagattgctggcctctgaagctgggctccaggctagagcagctccaggcccagatgaacaggtgtgtgtgctgtggtcagggctgggggctggtcatgggtagcccctcctagtggctcagacacatcacagggtgccaggtgggttttagaatggggcaggccatttagctgcaggtctccccatacctgtcattaagcacaattcccccaatgacttcccctagcaaactctggaacatgccaagggagcttctcgggggaggggcacaaccatgtgcagaaacaaattccataggtcctgggaaagggagtgtgtcctgtggatggcagggctatggtggcagagcgagggcttagaggcagaacagtccaggttcaaattctggctctgttccctaccagcaagagtgtgggcaagttactaaacagctctgaacctagtttgcccttttgtgaaatggggataattggaacatccacatcaaagcatcttggggactgaatcttgtatgcttggtgcctgctcactggtgttgttaagagtcaggggtgtaccagggggattctgggccggggctgtggatcccagtaaggaaatagcttcaggtaggccccaggccgccattccatctagcaggaacagcacgcaggctacaagattgacagctgccctcaggaactacttttgccagccctgaccctgactgtggggttctgtctggcaggctggagtcccgcgtgtcctcagacctcagccgcatcttgcagctcctccagaagcccatgccccagggccacgccagctacattctggaagcccctgcctccaatgacctggccttggttcctatagcctcggagacgacgagtccagggcccaggctgccccagggctttctgcctcctgcacaggtaagaggtgaggggattcccaggggcttacctgcgagcagctgcatgccttccctaccctgacttgttcacagtgcagcatcaggcccagagcctctgtggccccagagcagccagggcttctgcttacctcctttatgatcagagtcatgatagggttagcctgggcaaggtgctggcaaagcccagaatgtgactccagagcctgcagctggggccagggcagcaggaccctgaggtgtgggaagggcaggtacaatttttgcctgatcccatccctgaaatcagggtggattaacccgcagcctggcctggggtgcatccctctttcttgctcctcccagaccccaagctatggagacttggatgactgtagtccaaagcacaggaactcctcccccaggatgcctcacctggctgtggcaacggacaaaactctggcaccatcctcagaacaggaacagcctgaggggctctggccacccctagcctcacctctacatcccctggaagtacaaggactcatctgtggtccctgcttctcctccctccctgaacaccttggctctgttcccaagcagctggacttccagagacatggctcagatcctggatttgcagggagttggggccactgaactccaagataaagacaccatgaggggactgaaggtgggcaaggtgagagttaaggatcttggggaggtggccgggtgcagtggctcgcctgtaatcccagcactttgggaggccgaggcgggcggatcagaccatcctggctaacacggtgaaaccccacctctactaaaattaaaaaagaaaaaaaatagccgggcgtggtggcaggcgcctgtaatcccagctactggggaggctgaggcaggagaatggcatgaacccgggaggtggaggttgcagggagccgaggccgcaccactgcactccagcctgggtgacagagtgagactccaactcaaaaaaaaaaaaaaaaaagatcttggggaggcagacagccccccagatgggcctctcctaaagtagctacaaactgctgatccaggtgacccaggatggcgtgggtgaagaagctcacgacttttcccagcctcctccagggctccatttaaacagcaagcctggtgcagggtgggagagtctcaggtgtggaggcagcttacaggattgagggggcagtgaagaaagaggtttctgatctacatgagtaccttgctctgagcctcccagctcagaaccctccagcacctcatggctcagcaccaaggcccggggttggtcagaactcttaccatgagcctctgacctggctggagatggaggtatgttctgtggcagacatgtcaggacagtcctccagccctctgctcctgatggttctgtgacattgggtctcttgagggcagtggagtgtcacacagctaataaagtacacatttcatgttggactgggtgtgtaacttatctgaaggtcattacgtctttgactgtgctgtggctttctccaaacccttcttgtaaggagctgcagacttaccctccaccatatccagtgtgttggggacctgaaggtggttctgctgggcccagaggctcctggagcctggggctgttaggccgaggtgaagggaagcagaggcactggcttggtggccctaggggatcatgacaacagccaacacttcggtagcactcgccccgtaccaggcactgtgctgacagctctgcagatacttgttcatctaatcctcaaaacaaccccaacgggttggtattattatccccattttacagatgtgggatcagtagcagagagactaagacacccaaacatgagggggatttctgaggtgcaggtactgttctgtttcctgatctaggtgctggttacaggtgttcaggttgcgaaagagtgtgcttctgtgtgtaaattatacctcagttaaaaagaaaataaaaataaaaaaagaggccaggtgtagtggctcatgcctgtaatcccagggctttgggaggaggatgaggcaggaggactgcttgaggccaggagtccaaggttacagtaagccgtgattgcatcactgaactcacaccctgggcaagggaataagaccctgtctcaaaatgaaaattttaaaaatcatccccgtgcccaacacggggcatttgtattgacccatttctacccaaatagcagcgatttgagagccaccaccatctattttaaaaacacaagaaacccttctttaacatcgttcttttttcttttctcataattcccacttattcctcccatagttttatcctacatgtaatttattggtatgcttcaaagcctaatattgatcaccctatcatatgtttgcaacacaaatatgtatacaggctgggtgcagtggctcactcatgcctgtaatcccaacactttgggaggctgaggctggaagattgcttgagccaggaattcaagaccagcctgggcagcatagctcaacctggtctctacaaaacaatttttttttaattagccaagcattgtgatgcgcacctgtagtcccaggtactacagggcttgctgggaggcttgggtgggagagtcacttgaacctaagaggtcaagactgcagtaagccatgttcatgcaactgtactccagcccgggtaacagagcaagactcggtctcttaaaaaaaaaaaaaaaagtggctgggcgcagtggctcacacctgtaatcccagcactttgggaggctgaggtgggcagatcacgaggtcaggagatcaagaccatcctggctaacagggtgaaaccccatctctactaaaaatacaaaaaaaatagccaggcgtggtggcaggtgcctgtagtcccagctactcgggaggctgaggcaggagaatggcgtgaacccaggaggtggagcttgtagtgagccaagatcgtgccactgcactccagcgtgggcaacagagcaagactccgtttcaaaaaaaaagtaggtcggtcatggggtggctcatgcctataatcccagcattttgggaggctgaggtgggaggaccagttgaacccagcctgggcaacatagcaagatcttgtctctacaaaaaataaaggaggcaggaggattgcttgagcccgggaggtcaaggctgcaataagcactgtttgccccactgcaccaccacctggataacagagcaagaccctgcctcaaaacgaatgtgtataaattaattgacattttaaaattaatttttgtaaccttaataaggctttaagggttacatctattagtagtacagttgttcaaaacaacataaatatatattcaattttctaataaaaactaaaattttattggaaatatacgtcataaaagagaaaatttcctccccccgttagttcctatatctgtggataaatatcattattttttattagaataagacaaggtaccgcgaattttgtacgtctttttctttcctttttaaatttgtttttaaactttcctccttacaggggatttcctttagctgggcatggtggcgggcgcctgtaatcccagctactcaggaggctgaagcaagagaatcacttgaaccctaaaggcagaggttgcagtgagccgagatagtgccactgcactacagcccgggcgacagagtgagactccatctcaaaaataaaataaaattaaaaaaaaaagaggatttcttggccagatgcggtggctcacgcctgtaatcccaacactttgggaggccgaggctggaagatcatttgaggtcaggagttcgacaccagaatggccaacatggtgaaaccccatctctactaaaaatacaaaaattagctggctgtggtggtgcacccctgtaatctcagctactcgggaggctgaagcaggagaatcacttgaacctgggaggtggaaaaatcatttatcattaaaaattatatttagtgcccagaatggtggctcaagcctgtaatcccagtactttaggatgctgatgtgggaggatcgcttgagcccaggagttcgagatcagcctgggcaacatggagagatctcatctctacaaataataatttaaaaatagctaggtgtggtggcaaatgtctgtggttccagctactccagaggctaaagtgggggaatcgtttgaacctaggcagtccaggctacagtgagcccttatcacaccagtgcactccagcctgggtgacagggcaagaccctgtctttaaaaaaaaaaaaaaaaagtatttaatgttatcatccaacaattcaatacaaacctccttcaattttgatgaaagctgagaattggaaataatttatataaaggtgtcatttggtctctggcccttccccttttccaactcacaggcacagatacctttggggctggattagcatttgcgttgggatccacggcgggaagggtacaggatgggaactgacaaaaacagagccaagctggtcgggtcggtgcctaccccagaattcggggacatttctagatcctgcaggaaagcgcgggagggcctgactcaagctggcctggccctgagcgcatctgcgcgcccgaagcctgtccctgaggcacggagagagcagctttcgggttaaaagggccctgggaagagatggggcgggaaggtggtacccgttgggcgcaggccaggctgccaggccgcagggctctgtcccgcgaaagtcagtaggtcttccactaaggcagaattgtacttttactcgacagcgtggagaggccgctcagaacagcagcagcggaggggaagtcagcgcaggtcacagacggtttcactctcagagacttggcctagaacttggaggcccgctgctacagcacgctcgcctccaggccacccacgcccccaccacccgcactgagccgttatctgcctgactgacatcttggccaaccaatgacctttggggctgccaaagcgcctgcctccgagagttgggcggggcgagtagttgcaatgacaaacatttaacccaatagcgaggagatttcagacgctacggccgcaataaccaatgacaagaaagaatcctttcgaaaggacgtgtcaggcaaccaacggccggtgccgctgcgggggtccggcggcttccgttccgagagggcggggcggcgtcccaaaacggaaggtggttgtcgtccgttcccaagctggtttgaaactaggggtcgggctcggccgtcgtcgttgtttgtcgccgcatccccgcttccgggttaggccgttcctgcccgccccctcctctcctcccttcggacccatagatctcaggctcggctccccgcccgccgcagcccactgttgacccggcccgtactgcggccccgtggccaccatgtccctgcacggcaaacggaaggagatctacaagtatgaagcgccctggacagtctacgcgatgaactggagtgtgcggcccgataagcgctttcgcttggcgctgggcagcttcgtggaggagtacaacaacaaggtgggccgggcaggggctcggaacccagctggcggggagcgggccccgggagcgccctttccgggccggagcccaggcctcagaaccctcttgcggactcgccctagggccacggagcggttcctctgtctggccctgtgctgaaggtttcgtactcgttgtctgtctcctttaatccaggcagcattcttgtgtagtcggcagtgtagtggggaaactgaggcacggttttgtgacttgcctgggtcaggcagctatttcggggtggaaacaggtcttaaaaccgggtttacgccccaaagatactccatttattcatcccgtgctctccactcctgccgcattgctttcgttggtgggcggggaagggaagagagagtgatagctgtgaaggaaaatgcaggcgcttctattggtggtcgtgcactcctggccacactagatttctattaagacgatctattgtacaagcttccccgccccctactcccaccccccccgggtactcatggatcctagcccttctgccagaattactgttgctcttgcttcctgatatccattctctctaaagcaatctctttggaaatcttggcctgtggcatgatcccgccgttgtttcctgaacacagaaggatgacagggccttatctcttggcttgtttcgtgctagtacagttgtgtgacctttagtagtaagtcttgctggacatacatcaatttgagaatcctttatagaagcacggtgtagtaggggagcttttaaactggcattgcaacaaactcatttttgaaagttgaataagtcagttggaagaattttctttcttccttttactcaaagttgtgaatgatagcgatcagagcaactgaaagctgtggctagtgatatttaaagccactactcctgctttatgccatgaacatcagatttaagaagagtaaaactggccgggcgcggtggctcacgcctgtaatcccaggactttgggaggccgaggcgggcggattacctgagctcaggagttcgcgaccagcctgggtaacacggtgaaaccccgtctctactaaaatacaaaaaaaaaaaaaaaaaaaaaaaaaaaaaaaaaaaaaaaagccgggcgtagcttagtgcgcctgtagtcccagctactcggaagtctgaggctggagaattgcttgaacctgggaggcggaggttgcagtgagccgagatggcgccactgcactccagcctgggcgacagagtgagactctgtctcagaaaaaaaaagaagaataaaactgttcagtgacaaggctgatgcaggggggaagaaaccaggtggtcctgtctggttattgactagctgtgagatgttgcacaggcctgttttattatctgtgacccacagtttgtacggaaggggttctggtttacatgtgagggtcttgtaaaaaagaaatttgaacatttcacagtttgtttacagtttttcaggagcacatttgtttctctagagtaggtcctctttggagtccactttgagaagctgatgaaagctatggattctcattgtccagacattacacatacatgaacaatttacaaacaaatccaaggaatatgcactgatctttaagtccacccattgcccgggcgagatagagctttctttcctctgttgcttctttcttccttatggcccatagtggacagcagaactggaaatgggattcacgattctgatgtggacaccgtgttaataaaattaagaccactagaactattgtttaaagatacacgtggaaaataaaaaagtatgtctttcaaagggcttaagtctttttacacaaattaatgttttttcttgtaagtttttccagggtcgttgggtaagcaatagttactcctattcctcagagaggagaaactgagccacagttaggctgcttggtaggatcagtggagtagtcaaactgctgttgcaggaactctaccccagtttgtcctttcatttagcaactatctggagcttcctctttgtgacaggcacacaggtagcatggcttagcagtgaaatgcaaactaataaccccactatcaacagcattagcagttaactatatcttaactcacatgatgtaggcaatgcgctgtcttaaaatcatttttgtgcctccacctatcagtagatcagggttcttaaattctgtgtgccatggtcatctgataccaatagaccccttctcatagttatgttttcaaatgcataaaacacatagaattacaaaagaaaccacttatgttgcactacagatataaacaacatgttttttaaagtggtgatgtagtcatatgtacttttaataaattaacttattgatttacaccatccactgtaattattaatgtaattttgaaatggtgacaagggtaaacagcatttcaagatgcttaacaactgtgctgtggtgggaaaaaaaaattctcttgctggcaaagtcacagacagtcataccactgtgagcacctgaccccatttgtaattgaaggaaacaaaaaaatttagctagaggttaatggaaatatggggataattttccaattcaagttcacagaccccaagttaagaaaccctgcgagagagaagtatgtgtagtggttggtgagcagcaaatcctgccttaaagtgattctcaggctaagtttgtgagaaaccctgccaaagaggtggtcgacttcataatttggaggaactttagaattattggttggaatttttagaccattggttcctgcttgccatggatagtggtcaccagcagaggataaagtaaaatggacacagcaaattaacactgatgaaaaaggctagaagtggtcatctttttagtgtggagacattcactaagaaaacatggttgtaatttttaaaaatttgcattagcataatcatgttttcctaacgtaaaattgtacctagttgatccatagaattaagtctatcaacagtttaagaaattgacttccaggtgttccttcatgtgaataaatttgggaattgttgcagagtaaagaaacagattctatcaactacacttggaataaaaagccccattatagggctgggcgtggtggctcacacctgtaatcttagcactttgggaggctgagatgggagaatcgcttgagcccgggagtttgataccaacctgggcaacatggagaaaccctgactctacaaaaacattaaaaaattagccaggtatggtggcatctgcctgtagtaccagctacttgggaagctgaggtaggaggatgctttaagctcaggaggcagaggttatagtgagccaagatcacgccactgcactccagcctgggcgacagagccagaccctgtctcaaaaaacagcctcattattggttattatgtttctaccttcttttgttgtggtctcttgagggatacagcaagattggtgttggagcaacaggttctctaaattttagtgtgtgagaatcctgagggagctgcacattcctgggctccacccctgaagttaacagacttggagataggtgacagacacactagtggttgagtggtccagatggcactctcagaacatggccctggagctgccttggcatctgttggccagaggcgagaatgtgatctttttgtgtctgcatgctcctaaacattggttctgcccttccatccaagttcacccatgaaaaaagctctgtgattagcctgggttatctaagtcctgccacttcccagttttgtattgccttgggcaagttatcctctgtgtctcagtttcatcatctgtaaaattagggcaataaataataacatctaccttgttcaaagattaaatgagttaatatatgtaatggacttaggaacgccacccggtgtggaataagccatatagagatgttagctgttatttaattattatcattactgtacctgtaattgaaatataaccaaagagaattatatggctgtttagtaaatttacttttgtattttccagaaaggattcaggaataagaggtcagaaaggtagctgaaaaggtcattatttcattctctgccttttaaagactctggggggaaaattcccttatctctttcaacccaactcattttgtagtctagcagattcttatagtcagactccaagtagtgtaattttctagtttaaatccattttctcttgttctacctggcttacctacgtaagtcagatataagaatttggcatttctcctgtgttttgacaatatgtttggtctttaggcccaggtgttatttcccctcttttattgggaaaagctgggtagcagttcctgggcttctgttccacttaagtgcatgtttcagggttggttttgataaagatggcagtgtgattgggatttagtttgccccagtatttaactgactacttgtgctctaagatttggcatccagagagtatttttgaggttctgaggagagactgtaggtatatctgatgctttttggagaatcctagtagtgagtctgggtggcatgaccaccttgtacttgaaacactgggatgggtactcacctcaccagcctgtgttgattcctctgaggtttttaatacaattactttatatgtttgatgcataattatttcgactccggtatttaatttttcatcttggtatttgcggtagcccttcaggattatcattcatttgctcattaatttagccggtctgtattgaacacatactcatgtgttttaggcacaatgtgttttggtacacatcagtacttttgatagatatttagaatgtcgcagtgttccacgagtccctgtcaagactgtcagcaggggaatttaagacataaaactcttctggttttaacttcctcctttttctagacagtgagaggactcattccctgttgtgaccactggataaaagtgataatgctttaaaaaaaaatgctactttattgctttttgtcctaatcttgttcacatagacttattggagatgctgtcacttgaacaaggagtgaatctatgctctgtaggtagcctggcttgcctaaggacttgctgccaaagctctcgctgccagagctctctggtcagcctctgagccacgagccaaaggtgtgctgtgccagaattcatcttaaagtttaatagggcaggaccttgggtacctgcagacactggtccttggtaatcagtcaggaagaggcttgaagagaaagcaaatagaaaagaccaggaaaagctagtgtatattctcagaatattgtgttagccgatttttgttttattaacaattgtgggaaaatgttccagtgactggagtgttatgttgatttggataacttgggagcttattttaaaaattacatatacatacacacattcaccttcttcttctgcactaggactgtgtgtgttaaagtggaatatggccaggcgcagtggctcatgcctgtaatccctgcactttgggaggtggatgcaggcagatcacctgaggtcgggagttcaagaccagcctgaccaacatggagaaaccctgtctctactaaaaatacaaaattagccagacatggtggcacatgcctgtaatcctagctacttgggaggctgaggcaggagaatagtttgaacctgggaggcagaagttgcagtgaacggagattgtgccactgcactccagcctaggcaacagagcaagactgtttcaaaaagaaaaaataaatcagggccgggcgcagtggctcatgcctgtaatcccagcactttgggaggctgaggctggcggatcacgaggtcaggagtttgagaccagcctgaccaacatggtgaaaccccggctctactaaaaatataaaaattagccagatgtggtggtgcgtgcctgtaatccaagctacttgggaggctgaggcaggagaatcacttgaacctgggaggcggaggtgtggtgagccaagattgtgccactgcaccagcctgggtgacagagtgaaactccatctcaaaagaaaaaacaaattagctgggagtggtagcatgcacctgtagtcccagctactcaggaggctgagatggaaggatcacttgagcccaggaggtcaaggctgcagtgagccaagatcttgccactgaactcccgctggggtgacagagcgagaccgccatctcaaaaccaaaaaaacaaaacaaatggaatcagcacaatagctgtagaaagatgctattagaaaggatggggggaaatggaaaataagtggcagataaagtacccatactaaaaagatgtctttagcttggttgaaaaataattgtcagtcctaccactgtgagttcaaagaacttaagaaaatacagaacttcaagcagagatatagaggattgggtaaaataaggcatggcaaagagaaaatataacatcagctggcagagcacacaggaaagtagtggaagagaaaactaaaattatcacaggattaaaagccacattggaaacagaataaaggctgggcacagtggttcactcctgtaatcccagctacttgggacactgaggcaggagacttacttgaacctgggaagaggaggttgcagtgagccgagatcatgtcactgtactccagcctgggtgatgaagtgagactgtcaaaaaaaaaaagaaagaaagaaacagaataaagatgaacacacagtgctgaaaacagtaaaggttagggaggacagattgaaaaatgaaactgaagaaaacaatgagaacataatagatgcagaaagtaaaagagatctgacgtaagtataattggtgtccctcaagaagaggaccaaagaaatgaaacaaactcaaatatatggttaaagaagaacttagaagtaaagatttgaagtgataagttcaaattggcatgatttgaacttgccaaagatttgaagtgataagttcaaattggcatgaagtgataagaaaaattggcactgaacagttggcactgaaacatttcctaggaaaatttcttttttaaaaaatttatcttatttttcgtgtgttttgttttgttttgagacagtgtctcactctgttgcccaggctgggtgcagaggcatgatcccagctcactgcactcttgacctcctaggcttaatcgattgtcccacctctgcctcccgagtagctgagactacaggtgcacaccaccacgcccgctaatttttgtatttcttgtagaggcagggttttgccatgttgcccaggctggtctcaaactgtgggctcaagtgatccactaacctcagtctcccaaagtgctgggactacaggcctggcacagagcctggcatccctaggaacatttctatgttttaaggatgaagaaagaattatttggacacccagacaaaatgatcaagtcctctttaagaggggaaaagaaattaggctagctacatttgatgacagaaggccatggagcaatgtctaggaatgtacaaatactgtagattgtgctgctataaatacttggggatatacttaggcatatgtaaggtttatgtggaaataataatgctggggaacacaaaacaatactcgaaaaatgggaaggtattctcttttcttgtatagtaaagcttggtatcctaaagatgtcagtgtccctaaacttaatgtaatccctgtttaaaataccacagttgttttttctggagacagggtctcgctctgtcgcccaggctagagtgcagtagtgtgagtataactcactgtaacctcaaactcctgggcttaatcagtaggtgtctcactatgttgctcagactggtcttgagctcctgacctcaaacagtcctcctgcctgcccaacccaaagtgctggggttacaggcataggccaccatacctggccaaaaatactccagatttttaataatggttttttagaaccaggcaaactgattgtttctacagataaattttacaaacatgcacacattgtcaaaaaacttctgaaaaggtggactaatgatggatattaaaacataatgcaaagatataataaataagatcgtttgatactctaagaactgatgtataaacagagtctagaaatgaactcagaatacaaaaagaaatgtagtctgtgctaaaggtgataggaaatgaagaaaaaatatttttaaggccaggcacagtggctcacgcctgtaattccagcactttgggaggcgggggcaggcagatcacgaggtcaggagttcgagaccagcctggccaacatagtgaaagcccgtctctactaaaaatacgaaaaattagccaggcatggtggtgggcacctgtaatcctcgctacttgggaggctgaggcaggagaatcacttgaacccaggaggtggaggttgcagtgagccaagattgcatcattgcactccagcccgggtgacagtgtgagacccatatatatatatatatgtatatatatatacatacatatatatacgtatatatatgtatgtatatatatatgtgtatatatatgtatatatatatgtatatatatgtatatatatacgtatatatatatgtgtgtgtatatatatatatatatatttttaataattggtattgaaaccagaaaaaaaaattggatctctaccttaagctttgtaccagccgggtgcagtggctcacacctgtaatcccagcactttgggaggctgaggcgggtggatcgcctaaggtcaggagtttgagaccagtctggtcagcatggtgaaaccctgtctctactaaaaatgcaaaaagtagccgggcatggtggcaggtgcctgtaatcccagctactcgggaagctgaggcaggagaatcgcttgaacccaggaggcagagattgcagtgagccgagatggcaccattgcactccagcctgggcaacagagtgggactccgtctcaaagaaaaaaaaaccttgtaccagaattccagataaatggaagaatgtaaacatataactgtaaaacacgggagaatcttggtgtgagaaagccatgaaagtagaagtaaactatataaaaataaaatctctgtaacaaaaccaaagtcaaaagataagtgacaaactgaaaaaatacatgtaatgtcctagacaaagaacaaatcccttaataactgcatataaagatctgcaaatcaccaggagaccagtcacccagtagaaaaagagaaatagataggaagagtttccagaaaggatatgtaaatgattcttgaacgtatgaagaactgaacctcataagaaaaaaaaaaaatggagtttcagctagattaggaaaaataaaaaaccgtggtaatctactgtgtgtgtgtgtatacacgtatgtgtagctttcccatgcagttgctatcaaaatttaaattggcattattttccacctggtagttccgctagtggtaattcatcctacagctatactcatgtggttgaaatgactaaagtgcaaggatattcattttagcattatttgtaaaagaaaaatatgaaaatattattattagggaaattgttgaataaattatgctacctccatgcagctgttaaaagaatgagctagcttttcatatactgatatggaatattttaaaataaatattcggtggaaaaatatgtagaagagtaaacacctgtgttttttaaaagcatatgcatatacatatgtacacccatatgtggttgtgtgtagaagggatacacaagaaattgataacattgatttttccagggaaagggactgggatgtaggggctctaatttgtactgtaattgctttgcttttatgcctttcaaaatttgggccttgtgtatgtattacctagtaagaaagttagtaataaaaaagctaacattaataaaaattaaatcttagtagaacttcagaaagaggaataaacagaaaggaatgaatgaagaagcactaggcatatagtagcaagaagcagttctttttatagagaagaagtcaggcatgataatattaacatcagataaaattcaaggcaaaaatgttgaaacaaaaggaaatattttacatgttaaacatacaggctgggcgtgatggctcacacctgtaatccccactacaggctgggtgcagtggctcatgcctgtaatcccagcactttgggaggctgaggcagtcagatcacttgaggtcaggagttcaagaccagcctggccaacatggtgaaaccttgtctcaaaatacaaaaattagttgggtgtagtggtgtgtgcctgtaatcccagctacttaggaggctgaggcaggagaatgacttgaacccgggaggcggaggttgcagtgagctgagatcacgccactgcactccagcctgggcaatagagcaagactctatctcaaaaaataaaaaagaaaagtacaaccgactaagaataaaaagtcataagtctttacatatctaagagtatagcgtttaaatagaaagcaaaaattttgtaaatatagggagaatttggttcatatgttggaaattgttaagtgaagtagacaaaacaaggatatagagggttagaaaattacagtttgttcacacctgtaatcccagcgctttgggaggctgaggctggcagatcattgggcccaggagtttgagatcagcctgggcaacatggtgaaactccatctctatcaaaatataaaaaatagccagatgtggtggcaccatgcctgtggtttcagctacttgggagggtgaggtgggaggatcgcttgagcccagaaggcagtggcttgcagtgagcctagatcgagccactgtacttcagtctgggtgacagagtgagaccccatctcgaaagaagaaaatgtgttataagtatagagagctttgcattcaacggaaaattcactttaaacaataacccaatttacaaaaactgtgtatttagaaaaaaaatttttttaagttgaaatcaactgattggaaaaaaaatgctacatatcaaaacttacaggaaggtgaggaacctgaagctcagctatgtgctaagtggcttgcccaaagtcatataaggggtaaaggagggccagaactagagtgctgtctgtctccagagtgttcagaataaatgtatgtcaatgtccaaaaaaaaaaaaaaaaaacttagggggaaaaagaacatgttgaaaaacagaggaacacttaccctaccagattagaataaacatactggaattgatatagccagagagataggtggaactgaatagaatatttcaaagacaactttagtatatataaatgtgaaatatgtgataagatagaactgtaattcactgggtaaaagattacatcgtatggcacagttgttcatctagcagaaaaatttagaacccctaattcacagtgtatgatgaaaactaattccagatcaaacgtctaattataaaggaaagtccacaaacattattagaaagttgatcaggaaatttgtcatgaggcagtgggggtgcgcacggacactcattaattaattccagagtcaacaaaggaaaagattggcagattctatagtacatacaaataaaacatttctctgtgaaagatatgccatggacaaagtcaaaagacagcagaaaatattttctttttttattttttattttttattttttattattattattatactttaagttttagggtacatgtgcacaatgtgcaggttagttacatatgtatacacgtgccatgctggtgcgctgcacccactaactcgtcatctagcattaggtatatctcccagtgctatccctcccccctccccccaccccacaacagtccccagagtgtgatgttccccttcctgtgtccgtgtgttctcattgttcaattcccacctatgagtgagaatatgcacaagaacaaaaaaccaaacaccgcagaaaatattttcttttttttttttttcttttgagacactgtcttgctctatgagctgggctggagtacagtggcacaattcacagctcactgcagcctcaacctctcaggctcaagagattcttccacctcagcctcccaagttgctagaattacagacgcacaacaccctgcctggctagttatttttattttttgtagagatgggatctcgccatattgcccaggctggtcttgaactctgggctcaagcaatcctcccaccttagcttcccaaaatagtgggataatgggcatgagccaccaagccctgcctggcggaaaatattttcaaaacatgacagacaatagtagctaatactcaatgcaatagaaaaatggacaaagggtatgaatatctagttcataggagaggaaatgcaagtgatcagtaaacaggaaaaatgctgaacctcacaggtagttaagggaaatgagaattgtgatatcatctttcccttttaaatttataaaaattaagttattgcttctagtgctgttgacagtatggagaaatgaacacctttacatactgctgctaagaatgttagttgctacagtctatttgaaaagtaagttggtgtctattaaaatttaaaatgcacatactttctaatacagaaatcccactgttaggacattggcctccagaaaaaaatacagcagttcataaacacatatgtacaaaggcatataaataagtagtggtggctgggcgtggtggctcatgcctgtaatccctggagctcaagagtttgaaatcagcctgggcaacatggtgaaatcccatctctataaaacaaaacaaaacaaaaatttagcctagcatggtggtgggcacctctagtctcagctactcgggaggctgagatgggaggatcacttgaacccaggaggtggaggttgcagtgagctgagatcgtgccactgcactccagcttgggcgacagagtgagattctgtctcaaataaataaataaataaataaataaataaataataaaaataagtagcggcaagtaagagaaaacagtgtacagcactgggggaatcccggtacatagattaaaaaaatgatttggctcttcatattgctctgagggatgtccattattttgtcaaattaatagagattcatagccttggctctagaatttcatttttctaaaagttgagggaaaactttacacttaatgtatatatgtttgaccatatagaagaatgtagaagcaacacacaacaaattatgtgatatcttggggatgacatagagggatgttaactttatacacacacacacacacacacacacacatacacatatatacacacacacctgtgttttgtttgattttatatgatgtgatacactttataatcctcttacaatctaaaagtacatttaaagaatgtaataaacccaattggaatgtcatcaaaatagataaaacttgtaaaaatggacaagaaaatgttagaggatataatggtaaggggttcaggctagaactctggtatctaaattctagcactcacctctttttccactggagtcttatcaaggaaattatatacaaataatagtagccaaaggggaaacctagcatcattttattaataaccgaacaagaaccactaatgtggtgctgctccctggtgaactaagtggggaaaatgcagtttggccttgaagcctcagtgaaactttctgcttttctacctctgactcaaggacagacccaatctgacctctcctacccagttgtaggttcagagaaactggagcggaggatggtcaggcccattctgaggaggccaatttgcctgtccatgtaggagcaggataagccagagccagagagccatgggacatgtctgactgtagagtggtcaggcccatgcacctgtctcgggcttcagccaatcacttcagcaattcttcccccaccggaggagctagtgagtggtggggacagaagagcagaactcccacgctcagtattccctccatgggggactggggcaaaaactcatccttcctatgggcataggcggaaatgtggtgttgggggatgaggagcttaaagaatgagagtgctactaacaatttgtaacagtacagtcacgaatctagatgaggagttgggctcagtggctcatgcctataattcccagcactttgggaggaccaaggtgtcaggattgcttgaggccagtaattggaggctgtggtaagctatgatcatgccactgcgttccagcctgggtgagagtgagaccccatctcttagaaaaagagagaaagtccttacaaatcaataagaaagagatatccacaacccagtagaaaaactggacaaatgttctaagctggtgatttccgtgtaatggtgaagagtttgggtagtgggatgggactgcctgtatttaaaatagagctttgtggccgggcatggtggctcacacctgcaatcccagcactttgggaggctgaggtgggcggatcacctggggttgggagttggagaccagcttgaccaccatggagaaaccccgtctctactaaaaatacaaaaattagctgggcgtggtggtgcatgcctataatcctagctactgaggcaggagaatcacttgaacccgggaggtagaagttgtggtgagccaagatcgcaccattgcactccagcctgggcaacaagagcaaaactctgtctcaaaaaaataataaataataataataataaaatggagctttgtgatattgggcaagatatttaactcaacattctttactgaaagtgggaagaataatagtacctacctcatggcagtattgagaggattaaatgagatgatgtgtgtaaagcattaataatgcttatacttggtccatgtaagtgctcagttattaatgattattgttattcaaaagtaaaggtagtcaatgaacaaatgtactcagcctctggccaggtgcagtggctcacgcctgtaatctcagcactttggaaggcctaggtaggcaaatcacttgaggtcaggagttcgagaccagcctgatcaacatggcgaaaccctgtctctactaaaaatacaaaaattagctgggcatggtggtgtgtacctataatcctagctactcaggaaactgaggcaggagaatcgcttgaacccaggaggcagaagttgcaatgagccaagattacaccactgcactccagcctgggcaagagagtgagactctgtctcaaaaacaaaacgaaaatcccagcactttgggaggccgaggtgggcggaccatgaggtcaggagatcgagaccatcctggctaacactgtgaaaccctgtctctactaaaaatacaaaaaaattagccgggcgtggtggtaggcgcctgtagtcccagctactcgggaggctgaggcaggagaatggcgtgaacctgggaggcggaacttagagtgagcagagatggcgccactgcacaccagcctgggcaaaagagcgagactctgtctcaaaaaaaaaaaaacaacagttacacttatagaatctgtccaataaaaacatttgcacacacatacaaaaataaatgagtaagagtagtagtattagcaaaagtagagtagtattgtattagcaaacaatggtacataaccaaaacaactgaatagttaaataaattatggtgtgcttaccataatctgctatagaagaatgagggaaaggagagctatttgtactgaagatcttctaagattattgttaaaagcaaattgcagaatacagctgacaacggtggctgacactggtaatcccagcaatatgggaggccagggcgggaggattgtttgagcccaggagttcgagggagaccctatctctacagacaattcaaaaattagctaggtgtggtgtctgtgtacctgtggtcccagctccttaagaggctgaaggatcgcctgagcaggaggatcgcctgagcctgggaggtcaaggctgcagtgagctgtgatcatgccaccgctctacagtttgggtgacagaatgagaccttgtctcaaaaaaaagttgcagaatacattttatgatgcaagtctatttaagcttttttctttctttctttcttttttaaacagatgaggtctcattatgttgcccaggctggtctcaaactactgggctcaagtgatactcccttctcagtctcccaaagtgctgggattacaggtgtgagccactgcacctagcacctatttatgcttttttaaaaaaagaaaaaaccacacacaaatacatggagaagtatttggaaagatgcacaccaaatagcatcagtaaggatttttgagggtcagtaagcagatgggaggctttactcttttactctgtattatatgcatattcagagagaacttatattttctttcatcattaaatttaaatggatatctgaacaaaaaaaaattgaacaacatgagagccaattgtaattcctctcaatatttggttggcaacttggagcagaagagccagtgtcagtttggctgaggctaaaacacacacttgtgcaaacacaatgtagtctttggaaagagaaactaggctgtgtgattagaacattcaggtgggccaggactgtctattgtaagtagtacaatcttgaaatgttgaagaaaacacaatcaattttggaaagagatgaatttctggtcagaaatattataaagcacacaacatgctaaactctagtcgtaggcaaagcttacattgttttgtaacagtacatgagattttatttggcgtccttcttttttttcccccctaagacaaggtctcactttgttgcccaggctggagtgcggtggcacaatcacagctcactacagccttgactttctgggttcgggtggtcctcccatctcagcctcctgagtaactgggactacaggcccgtgcaaccacacctggctaatttttttttacttcttacagagatgggattttgtcatgttgcccaggctggtctcaaattcctcttgggctcaagtaatcctctggccttggcatcccagggtgttgggattatagtcatgagccaccgcacccagcctggcatccttcttaaatatagcatgtaccctgaaattttaccctgattttgttttgttattgtttttgttttttgagatggagtctcgctctgttgcccaggctggagtgcagtggcgtgatctcagctcaccataacctccacctcctgggttcaagcgattctcctgcctcagcctcccaagtagctgggactacaggcatgcaccacctcacccagctaatttttgtatttttagtagagccaggctggcctcgaactcctgacctcaagtgatccacccgcctcagcctcccaaagtgctgggattacaagagtgagccaccgtgcccaggtctgatttcggatgtagaaagatacatggtagaattgggcatgccctaagatattccagagaagctttgcattttattcggggtactatatgtagaaagttcttagtctttgctttggttatcagttatattaggttagtgcaaaggtaatttgcagttttggccatcacttatgatggcaaaaaaacacaattacctttgcaccaacctaacattaaactcaggcgctttaaattttacactgaaatacgttgaaagctagcttagttgatctctgtcattaacagaaaccatctctgtttttgttattttcttggcttgatttaacgttcgttgctcgcaagaaacagaaacccactcaaggtagttgaaggaaagggaggttttcattcaagggagttggagaatcggaaggcaagaatgagcctcaggcctctcatgggactggacccggccagtggaaagctgttgtctcacaccctgccccacctcacaatacatgtctcttttctgcctctttccttgcatgcttgtcattctcactcgctatgtatgccagctttccctgcagctccatgcacgctgcgtctgtggccctttcctgccttttgccttccaggctaaaactagatagcttttgggtcttaattccaaatgcttaggagtgaatcggttagctcagaagtccaaccagttcaaacacctgtgtcaatctagcacattaattctcaaccttggctattatttgatgtcactgggagctttaatagataccaaagcctgtgtcccattaccagaaattctggttttagtggtctgggatgttactaaacctaatttgttgggatatgtttaagttcccagaggattctaacatagagctgtggtccatggttaagaagcactgatctaggagagaagagggtcatcttataggcgtggaatgctcagatagtggggtcttggcctaggtagattattctcccaaagatgtcctctagggtgtccccatttttggctttaacctaccagtcctctttcttatagggtgtgttggaataacctatggagctctactttaaggaaaaaaaaaaaaaaaagctcatgcccagacctagtaaatcagaaccttcagagggtggggaccaagcaggcatagtttttaagctgccctgcaaattccaacagtaccaccaggcctgatctccaggccgtgcactctcacatagcagcaccatccacagtcatggcttcatatataccactttggtggttttttgtttttgtttttgtttttgtttaattctaaggtgtctcaaatcttggtcagatatttaggagccaatactatctgacctctgagtaacaaatgtacctttttatttttaaatagtctagatgtctttttgtttttgtttctgtctttgttttgagatggagtgtcactctgttgctcagggtggggtgcagtagtacaatcttggctcactgcaaattctgcctcccgggttcaagtgattctcctgcctcagccttctgagaagctgggattacaggtgtgcaccaccacgctttgctaatctttgtattttttgtagagacgggctttcgccatgttggccaggctggtcttgaacttctgacctcaggtaagctgcctgcctcaacctcccaaagtgctgggattacaggtgtgagccaccacacccggtctagatgtctttttccaagtactttggtaagagaaactgggaagcaccagctatgtcaagtgtgtgtactacagtgggttaaacattactggtggggagggtgattcattacagggatgttggtcacatcagcctaacagctgacagaaatgataggaaaggcaaggcgtgatggctcacacctctaatcccagcactttgggaggccaatgcaggcagattgcttgagctcaggagttccagaccagcctgggcaacgcagcaaaaccccgtctctacaaaatatggaaaaattagccaggcgtggtggtatgcacctgtaatcccagctactcgggaggctgaggcacaagaatcgcttgaacctgggaagcggaggttgcagtgagctgagattgcgccactgcactccagcctgggcaacagtgagactccgtctcaaaaaaaaagaaaaaaaaagataggaaaaatgtttattatattctttgcctcctagatactggtcctctcatatatatccttgatagggaagcctcctcttcccttgtgagggagggtgtagggaaacaggcatttgcatagttaggtggtaagagtgtaaattgcaaggcaagtcagaaagtagtgctctgctctatagagcactataacttactagtgcagaaaaacattattaggatatatattgaggcattgtttttcatagggaaaatgggaattagtctaactgtcttttgggattaaatacattgtaatttggctatcttgtggaatgctatacagttgtgacaattagacagatttatttgtattggcaccagcatgaaaaagaaaattgtcatgcagaatatgattggaaaaaattttaaaattttttgaaaagagaaaagatggccaggcacggtggctcatgcctgtaatcccagcactttgggaggccgaggctggtagatcacttgaggtcagaagttcaagaccagcttggccaacatggcgaagccctgtctctactaaaaatacaaaaattagccaggtgcgatggcgggtgcctgtaatcccagctactcaggaggctgaggcaagagaatcacttgaatccaggaagtggaggttgtagtgagccaagatcgtgccactgcattgcagtctgggcgagaaagtgagtctccgtctcaaaaaaaaaaaagaaaagaaaattgatatattgtgtaaaggaagtgagttgcagaatagtataattatatttatgtaaagaaaatttgtatctgtaaatctgtaggcaagatctggaagtagttatatcaaaccaaatggcaattactggtatagagggatggggtggcattgaaagagggacttgtacttttaattctctatacttagtaccttaattatttacagttagtataaattacttctgtaatgcttgaaaatacttaaaaactataaagaaccatgggaaaaaagaaaatgaatggttatctttatgtggtgggattttaattttaattttttgtgtgtgggggggcagtattttttataaagaagaagttttaattttctaattggggaaaatcatttttaaaaattacgtcaggacttgaatttcatgagccttttctgaaaaatgaggatggcttttttcttgaattcaaattaaaaatttaagtcattacctcttctgaaagcattgataaggtcaaggaaagatcgaatctcagctatttcctgacttctctcttaggttaggtactatttttcagagattgtcaaactttgctgaaatcacatcaccaggggtgatgaattcctaagaatagagagtcctgggcctcacttgacacttactgaatcagaatcttaggctggagttgaaggcctaggaatgtaaacctcttcaggcaagtctgatagctaagttggaaaaccattgctgtaggcagtacaagcagaagtaagacacaggcctatatttaaggcatttactaagtgaaatagcataagacagtaatgtcagtgctttcatgaggcactatgggattagtcaccaaacagatgttagagataagcactgaaagaaagagcactggaccaggaagactgtgaatgccttatgaaggaggcaagatgtcataatattcaaagctcatatattgagtaagacagttctatgtagagctgttacatacaactcaaggtaggtactgtgaatatcctcactttacagattgggaaacaagatgagcagagttaagtaacatgtccaaagtcttacagctagcaggtggttaagtggggagccctagaagcccaattccactgtgccgtattaacattgggcaggatttgggtcagtggaaaggatgtatgaggattttacaggtatagagggaagtgtaaggaaagggatgggaagcagtgactagataaatgaaggtggaatataaggtaagttagggctgggtggtagaaagtcttgttaggctaagaggatcccaagtgtcaaatgctcacaagattggatatttgaagcttgggaggaaatctctgatgacttgaaagacattttctcttccagttgaacttcacagtgttatctgcaaagttagagagggatttggggtttcatgctccctggtgtatccacagcacttaaaacagtgcctgactcctaagagctgtctactaaatacttcttgaatgaatatataaatatctggctcacaatctacatcagagacttattctttcttttttctttgtttttctgagacaaggcctcgctctgttgcccaggctgcagtgtggtggcatgatctcagctcactgcaacctctacctcctaggctcaaaccatcctcccacctcagcttcccaattagctgggactacaggcatgcgctaccacacccggctaatttttgtattttttgtagagatgaagtttcaccatgttgcccagtctagtctcgaattcctgggctcaagccatccaccctccttggcctcccaaagtgctgagactacaggtgtgagccaccacacccagcctcagaggtttattctttattctgcccaatgagcctcagaatttagcctttcatgtttttgttgttgttgttgttgtgtgggtacataataggtgtatctattttggtataggcatgcaaaacataataatcacaacttggaaaattgggtatccattgccccaagcatttatcctttgtgaaaatacagaacactttacaaatttccatgtcatccttgtgcagggaccatgctaacctttgtatagttctgatttgagtgtgtgtgctgctgaagcaagcactctcatctgggtttttttcccgtttctcctccacaaaggctgataccaaaaattccacatttcatctagaatcttccttctttatgtaatattttctggctgggcgtggtggcttatgcctgtaatcccagcactttgggaggccaaggcgggtggatcacctgagatcaggagcttgagagcagcctgaccgacatggtgaaaccccatctctacgaaaaatacaaaaaaaaaattagcagggtacagtggcatctgcctgtaatcccagctacttgggaggctgaggcaggagaatcgcttaaacctgagaggctgaggtagcagtgaaccaagattgcgccattgcactccagcctgggtgacaagagtgaaaatccgtctcaaaaaaaaaaaaaaaattatgcaaaggtgagaatgtcaactttttagttccatgtaaaaactgttcatttggtcacagtccctcttgtggccattcctggttatcccttgccattctcactatcccttaatttttcccctgttcccctctgggctccctgcctccagccacctccttgatccagtctgtcccgcccagcactaccagatgtgtggccctcagaggccttgtaatcataccactgtcttctcagacaccttcatcgggggaaggtgaaggttgcttttggtgccttccagcctaccctcagcacaccttcccagctgcatctccgctgcactcccacgtggctctctcaaacaggcctgcttgctgctatcaaatgggtcatttagtttgccacctttgtatgtgtgacccttctgttctacctacctgggatgcccttccctttcctatttgcctacccagatccttcctattctcctttgaagactctgctcagatgcttacttttttcctcaggtgccccatttgaattattgctgtttcctctcaattgttatcgattattatctgtgtcataaataagaagccaatcatgtattaccttgtgacattacttgcattgctatcttaagtgttttaggacactgggttttgtctccttttacatctttatacgttaactcccctaacaattatatgattgttgaaagtctgtgggtgctccataaaatgaatatttagacttagtcatatggatttttaagagttaaacatggatgacaagatctatgaatatatgtagaaaaatccttaggaatctacaaaaaagctactaaaactaataactaatgtagcaaagttatagaagccaagattaatgtacaaaaatcagttgtatttctatatacagtaccaatgaacaattggaaatggaatttaaaacagtttcatggtcaagcacagtggctcatatgtgtaagcccagcatactgggaggccagagtgggtggatcacttgagcccaggagttcaagaccagcctgggcaacatggcaaaaccctgtctctacaaaaaatacaaaaattagctgggtacggtggcttgtacctgtagtcccagctacttgggaggctgaggtggtaggatcaattgagcctaggaggtcaaggctgtagtgagctgtgattgagccactacactccaccctgggtgacaagcaagatcctatcttaaaaaaaataaaacacaatttcatttataatagcataaaacttgtgtagaaatcaagttaatgggccaggcgcagtagctcatgccaataatcccagaactctgtcaggctgagatgggcagatcacttgaggtcaggagtttgagaccagcctggccaacatggtgaaaccctgtctctactaaaaaatacaaaaaataaaaattaaaattagccaggcgtggtcacgcacgcctataattccagcaacatgggaggctgaggcaggagaattgcttgaacctgggaaacggaggtttcagtaagcggagatcatgcccctacactccagctgaggcgacagagcgagactcagtctcagaaaaagaaataaagaaataaaattaatgaaagaatcataagaagtacactgaaaactttaaaacattgctgaaagaaattaaggcagccgggcgtagtggttcacgcctgtaatatcagcaccctgagagggcgagacaggcagatcacttgaggccaggagttagcgaccagcctagccgacatggcaaaaccccatctctactaaaaatacaaaaattgcctgggcgtggtggtgcgcacctgtagtcccagctaaggcatgagaatcacttgaacatgggaggcagaggttgcagtgagccaagatcgtgccactgcactccagcttgggtgctagagcgagactctgtctgaaaaaaaagaacttaaaaaaggcgtaaattaatggagaaatgtgctatgtttatgcgttggaagacttaatattgtaagatgtcagttctccccagactgctcaatagattcaacacaatcccaatcagaatctcagcaggctttttgtaaaattcgacaagctgattgtaaaatgtacatggaaaagcaaaagtagagaatagcaaaacaattttgaaacagaagaacaaagttggagaactcactgtctgattttagaacttactagaaagctactataatcaagacagtttgcctactagcagacagataggcaaataaataatggaacagaatagagtccagaaatagatgaataaatacatggtcaactgattttcaataaaggggtcaaggtaatgcaaaggagaaagaattctcaaccaatgatgctggaagagtcagacgttcatatgtaaaaaagcaaaccttgttcgggagctgtagctcacgcctgtaatcctagcactttgggaggccgaggcgtgtggatcacctgaggtcaagagttcgagactagactggccaaaatggtgaagacccttctctactaaaaatattaaaaaattagccgggcgtagtggcacatgcctgtagtcccagctacttaggaggcagagaggtaggagaattgcttgaaccaaggaggtggaggttgccgtaagccaagactgtgcccattgcactccagcctgggtgacaagagcaaaactccgtctcaaaaggaaaaacaacaacaaaaagcaaaccttgattcatatcttgtaccatataaaaatttaacttgaaatgactcagagacctaaatatgaagcctaaaactagaaaacttttagaagaaaacagggaaaaatatttgggacctgggattaggcaaagatttctcaactaggacataaaaaattttttgggtgcggtgcttacgcctgtaatcccagcactttgggaggccaagccaggaggatcacttgagcccagaagttcgaggccagcctgggcaacataaggagaccccatctctacaaaaaatttagaaattagctgggtgtggtggcacatgcctgtggtcccagctactcaggaggctgaagctggaggattgcttaagcccaggaggttgagcctgcagtgaaccacgattgcaccactgcactcgaaccagtgcaacagagtgagaccctatctcaacaacccaaaattatactgccacattgcacataatgcaatattattcagcagtaagaaaagaagcaactactgatacacacaagaacatggatgaatctcaagagcagtgtactgatgaaagtagccagacacaaagactcaagaccatctgattctatttatatcgtattatggagagacaaaaccatagatcagtggctacttggggtaggtatgaggggttgactgcggaggagcctgggagagctttctgggttaatggaaatgttttatatcttactgtgggggttatacaactgtacatttgccaaaactcatttaactgtacacttgagtgggttttattatatgcaactatacctaactttggggggaaaatgtctggaagatactggtgtgtctgagactgaggtcagaaagatgagtagaaggaattttattttgtgttgtctggttagtgcttttccccttattgtggatgtttaccaaatatccccactattccatcttccagttggaagttcataagcaaatgtacagttagtgtcccattgagccagattgagtttgacagcaaagattggaagttaatggtgggctaaaattgactctaagaaaaagtgatcagagctaggtgggactttctcatcaatggcgccgactttttttttgccagtcacagtggtttgggctctcaaacggtcatttgacatacctttatgtgtaaacataatgagccagtgttgagtttggggttggtgagggttgtgcactattggatttttaagtgagcattagtttgtttaatgaaattgcaaagggtgtttcatattcctggcccctgagcaccaaatgtcctcagcacttcagtcattgtggcagccaagaaccacccctggtcattttcaaataccttaggggtttcaggggaaggtgtgcctggcctggcagatagtgcacttatgtagttggagtcaagaatgcagacttgagtcagaaaacctgtaatctctgtctcctactggctttgcagtgttgagtgtaaccacccctttgagtctgggtgtccttgtctgccagaggatggttggactagataccctctcatggcaatcgtttttgattctgcagtttagtgtagtacagtgtcaagacttctgtcactggccaggcatagtgactcatgtctgtaatcccagcacttttgggaggctgaggtgggaggatcagttgagcccaggagttcaaggccagcctgggcaacatgtgaggccttgtctctacaaaaaatgaacaaaattagctgtgtctggtggtgcatgcctctaaccccagctacttgagaggctgaggtggaaggatcacttgagaccaggaggtggaggctgcactgagctgtggttgcaccactgcactccagcctgggcaacagagcaagatcctgtctttaaaacaaaaaacaaacaaaaaaaacctctgtcactgaccagggatctaatgtatttgctgtactgctcacaaatgcttatgtggctcaactttggtatgttacaggttcagcttgttggtttagatgaggagagttcagagtttatttgcagaaacacctttgaccacccataccccaccacaaagctcatgtggatccctgacacaaaaggcgtctatccagacctactggcaacaagcggtgactatctccgtgtgtggagggtaagcggatgctttattagcagccagacaagtgggctttctcagcctcagctgttagcagtgaaaagtcacagaacagacaggggtcagaggcagcgagtgtcattgcagcacaggagaagcaagcgaagcttaaatggactggcctcgtttggctcagcagattttctagtatatcaagtcaagattccatgaagtctggctgctggctgcagtcagctcagtcaacccgaggtgatgatgacggccttcagtggaggtgggaatacttgggaactcatattctgtttgcagccaaggtatttttgagtaaactaaatgaaataccaggccattgattctgataaagtgtgtgagtggatcttggaggcttccctccaccctcagctgagctcatcagcagcagcgtcctctgtagcatgggcgtggccttagtacacctgtgcagaggttccaggctgggcaaagtgagaagacctctcctctaggaaggtgcagggatgaaaatgtagaaaacaaagctgggcagaggagaaagtatgggaaaaagtagcattcagggagtcctgggtttattactgtttttgataaaaatgttttcccctcatgtcttatgtttgctaagatattttctaaacagggattttttaaaagactttttatgaggataagactggctgattttttttaaaattcttgttccttcaggttggtgaaacagagaccaggctggagtgtttgctaaacaataataagaactctgatttctgtgctcccctgacctcctttgactggaatgaggtggatccttatcttttaggtaagggagttagggagtatgtatttcagctggaagaagccaaaataaattttctcagatgtcacactgggccatacatcctagaacaaggctcagtgggaagtaggctaggcgtggaatgtggttatttattaattcctttgtgtgggtgagctttccgtgtgtatagatcttgtctctccagttagaatctaaggtcctacggtgaggactgaagacttgactgcctcggtggctctgccggtagcccccaccttgttttctgtagtctttatggtatgctgctccctgggctgagcagatgagtaaacacaagagggaagcttgcatgagaaccttggtcccgtcagccctgacttgcactggttgtttgcaggtacctcaagcattgatacgacatgcaccatctgggggctggagacagggcaggtgttagggcgagtgaatctcgtgtctggccacgtgaagacccagctgatcgcccatgacaaagaggtaagatgcttttccatttcgtctttcctcaaatgcttcctgtgccttccgcacaggaagaggtcagcttgttctctcattgttctgcaatttatgtagaaaatcataacataacatcttcttgtctaaattgacaatagtaatgtatcaaaaacgggaaaacaacactattgtaaactaatgcttttttttggctaatgtaaatgacctattctacggtctgtcattgttcttttcatgccagaggttgctttttttaaataacaaagtctcttatagaggagctgggaactgatgtgattaaaaaataactttagagtaatacttatcttgaaacagattagatttggggaggaaagaagggagacaggaagagaaaaaattttctgagagacaaacgtaattattcatttttctctataaatgttttaccaaatcctagtatgttcacttaatctttatactttcattactgttggcagtggaggcaatggaatatattttattttgatggcgatgcttctgtgtttattgggaaaactgagaagagctatttgtgattgcttttttttttttttttttttttttttttgagacaaagttttcctcttgttgcccaggctggagtgcaatggcgcaatctgggctcactgcatcctctgccttctgggttcaagcaattctcctgcctcagcttccggagtagctgagattacaggtgcccgcaaccacccctggctaatttttgtattttttagcagagacagggtttcaccatgttggccaggattgtctcgaactctcctgacctcaggtgatccacccaccttggcctcccaaagtgctgggattacaggcgtgagccactgcgcccggccaattgcattttaatcaaagcattcttctcagtgattttggaaaatccccataagtcttttcctcctacagccattgcatgctcctggtactctcatctcctgtgggtactatttcctgttcttttctaccttaccctgcacagctaggggtattaatatctatacagataaaaggaatgccttgatcttaggtcagaaacttgaggttgtcaacagcataggaagatgtgacccaggttatcattcttagtaaggggttgtctttggctttctgtactcctgaaggtaagccctgttacaagacttctagagttgactgctgctaaaccaggggtcaaatgaagagtttgtcccacagagaggaccagtaaggaacttctggaaaccctcttggcatcaagttgaacaagcggctacattttagttatatgacaacttagcctgctgttgtctgttaggtccaacccagaaaatgggaactactcttaagtatttgaactgcagggatttaatccaggggctgcttatacagaagatggtaaagctgagaagccacataggtagcagtgaggtcatccatagaatgggagcagcaggaagctgcagctgcctataggccagagggaccatgggaggaggcagggttcctggagcccaggggctggatttacctggcagagacgcttctaggaacagagagaggggaggagaaataccttagcttttccctgcctcccatcatccattttcccaccaaagcctcccatggctgaaccagccagaagcagccagcagatctgagaccctgccaaatgcacgctgtaggaatcagttctcttgtgacacagagaagaagagcagggagaaaggccaggaatggatcttgacagcagacaggcctggaccggcagccttgtcttgaaggaataaacctgagaaaggatagtggctctagagaaacagtaatagcacctttctagcacctttgatttttctcagtccacctttctctaggaaaagacttgtttggaaggctctcattgatacctggcagatcagtgtagaagagggtttagtgtacttgggagttgtcaccttcccttggtttcccagtgaaccatgctagcggagcactgaaggagcagtcacttagagccgagagagcattacacactcagccacgctgcccatggcacctgtgggatctctgtccctgagggttaccaggagctgtcattggggggtatacatattgataaacatggctgtgccttaaagcagctgtacagtactagagaaagcctcgatctgtcaggcacgtcaggcctgagtgcctccttgttgatgactggcccggtcccttttgaaccacttctacttcctgccatagaaagacaagcataatttcttcatagccagaaaaaaaaggaattcgtgaggttaaatagcaatagatgctcatttggcagtgcccctctgtaggcagaacttcaacactggagctgtaatatttagtgagaaattctagtcgtgtctccccagaagtcagctgttattatccccagaagatgagttttgtttggcattagtttttctgtttctctctctatttgtctgtctctggctctctcttcgtccctcttcgtcctctttttttttttttctttaagacagagtttcgctctgtcccaggctggagtgcaatggcctgatctcagctcactgtaatctccgcctcccgggttcaagcgattctcctgccttagcctcccatgtagctgggattaccggcaccagacaccacactcagctaatttttttgtatttttagtagagatggggtttcactgggttggcccggatggtcttgatctcttgaccttgtgatccgcccgcctcagcctcccaaagtgctgggattacaggtgtaatccgcacccggccttcgtcctttctctgaagctctccgttgctctctgcctctgtttcctcatagacgttagtgatatgcaatgtttgcagcaaataaaagcagaaaacagtgattcagaacctaaattgattcacttatgatctcaaaccaactaggagaagaaaaaacatgtcctaggacaagcgggtgctactaacctatttgtgaatacaggaacatctaggcctcccgtgactcaaaatttctgttacctctttcttgcaaatgagtctcaggtccaggtttcacagaatcagcttggctgctattaagtggccacaggagggctgctttcacctctgtgattgatgatctaggccttaatgagctcgtagacctgcctctgattgtgcacaaggcccaggaaataagtgtctcattcttgttgtgtggcagaagacagccactgttctgttggtcagcagggcatgtgcctttgttttatcacgggttggaggaagaagacttggaaagcaggaatgtgggaagaagccagccaatttctatagcagaatgatcttccatctttgggaagccactgatattagagctctcgggtttcagtactcacagacactgtttgggcttcatttatctgcttttgtgtcatgagcgaggtttagatgaactggacgtggcagatttccctcctataggaagaagaggtaatggatctgaatctgactggagcttcttgttcaccaacaggtctatgatattgcatttagccgggccgggggtggcagggacatgtttgcctctgtgggtgctgatggctcggtgcggatgtttgacctccgccatctagaacacagcaccatcatttacgaagacccacagcatcacccactgcttcgcctctgctggaacaagcaggaccctaactacctggccaccatggccatggatggaatggaggtgagcactcctctcaggctaccatgggccctgcctaactccagcactgcttagtatatctagaaggctggttctcaactggagcagtttggctcccggagtatctttgggaatgtctggaggcatttttgattgtcacagctctagagacgcagttggtactatggcatctagggggtagagaccagggaggctgctaaatatcctacagtgcccaggacagtcccccagcaaagtatatcctacctaaaatgacagcagtcccgggactgagaaagcctaatctggaataagaattacttgttaagaacttttaatttttgaagagttggagttagagccaggaaaagcaatatctaaagagtaaaccaaatcgtatgtgcctatggtgctgagtgaaaaagcagattttcccttctgtagtctggacagattcatctagctttagcaaacagatgtagaaatggcagccctctggccgggcgctctgggtcacgcctgtaatcccaacactttgggaggctgaggcaggtggatcacgaggtcaagagatggagaccatcctggccaacatggcgaaacctcgtctctactaaaaatacaaaaattagctgggtgtggtggcatacgcctgtagttccagctattcgggaggctgaggcaagagaattgtttgaacctggtaggcagaggttgcagtgagccaagatcgtgccattgcactcaagcctgggagatagagcaagactccatctgaaaaaaaaaaaaggccaggcacggtggctcacacctgtaatcccagcactttgggaggccaaggtgggcggatcacaggtcaggagatcaagaccatcctagctaacacggtgaaaccccgtctctgctaaaaaaatacaaaaaattagccgggcgtggtgtcaggcacctgtagtcccagctactcgggaggctgaggcaggagaatagcttgaacctgggaagcggagcttgcagtgagcggagatcatgccactgcactccagcctggtgacagggcatgctctgtctcaaaaaaaaagaaaaacaaatggcagctctctctagtctgttacttgattaaagaggtgaattgtgggtggggagaatgcattggttgtccttggtttggtggcgctagcacctcagattctgctttggctgggctctcattccattcatctgagatgcatagaattcttaccacatgcacctgctgggacccaggattacccagactcctgttgtctgtttctgcatctcccctatcagtctaaaggcccagtgttgctcaagatagagactatcaactacccgtgtcctttgtcttcttttccctcaatcctatggaaatcctgtctctagttctttaaatccacaaatgaaaaattatgcctaaaaagatttttgcatgtggatagtattttttgtttttttctatgaaactctgatgatcccaggccttttacttgttatttccgcaggtggtgattctagatgtccgggttccctgcacacctgtcgccaggttaaacaaccatcgagcatgtgtcaatggcattgcttgggccccacattcatcctgccacatctgcactgcaggtaatcatggtggggagaaagaaatctgggaaggatggaggaaatctgttctcttggctccttagaattgtagttgttactgttttctaagcacagtcttgagagatttatacaaaatgactagttggagcctctccacacttgtgaaattcaatcagtacaaatttttagacgatcttgtaccctcatggacatcagaacatcttccatatatgatttacatcatgtgtcagttatagggctgtgccttgtactgtgcccctgaaatctggatggcacagaggactcaattccaggaatatggggaaagggaggcatccctcatggatataacagaatctttgggactgtgaagatcaacatctccatgggacctttcaggtttcactataacaaacccacagtgtgctctggatgcatcggagggccccacagaactttgcctggttgtggtttgtgacttgtggttttcatttcactgtttcccagaccaaagctagcaccccttacgggctgggtgcagtggttcacgcctgtaatcccagcactttgggaggctgaggcgggtggatcacctgaggtcaggagttcgtgaccagcctgacaaacatggtgaaaccctgtctctactaaaaatacaaaaaaaattagccaggcatggtggcacgcacctgtagtccaagctacttaggaggctgaggcaggagaagcacttcaacccaggaggtggaggttgcattgaccagagattatgccactgccctccagccagggcaacagagcaagactctgtctccaaaaaaaaaaaaaaaaaaaaaaaagtaccccttaaaaatatgttgggccaggcacagtgtttcaggcctgtaattgcagcactttgggaggctaaagtgggaggattgcttgaggccaagagttcaagaccagcctgggcagtatagtgagacctcatctctacagaaagttaaaaaaagactatctgggtgtggtggtgaattcctgtagtcccagctacttagaggctgaggtgagaggatcccttgagcccaggagtttgaggttacagtgagctgtgattgtgccactgtactccagcctgggcaaccaagcaagaccctgcctctaaaataaattttaaaaaaagaaaagaaaggctgggtgcagtggctcacatctgtaataccagcactttgggaggccgaggcaggtggatcacgaggtcaggagatcaagaccatcctggccaacatggtgaaaccctgtctctactaaatacaaaaattagctgggcgtggtggcacatgcctgtagtcccagctactcgggaggctgaggcaggagaatcgcttgaacctgggaggtggaggttgcagtgagctgagatcgtgccactaccctccagcctggtgacagagtgagaccccgtctcaaaaaaaaaaaaagaaaaatatgctggttgtcaatgcacttttattgtagaaataatgccaatctgttatttaaattgaaaacagtacagaagcatatttaagagcaaggcgaaagtcatcttttctccttcctatatcatttctgcctccatccccctctgcatagatgacctctatcaacaggtaatgtgtctccttccagacccttttggtatactttcagggatgtacatctatgcccccaaatacaactatatacttcttccttttgcactgataggattctgtcctagtcctgtgatgttttgctccttaacttttttagtgtgttttttttcttctcctcactaatcaggagccttataatggacaaggtttgttatggagcccaagaagcaatgtactctggtgtttttctgccatttgagcattatttggaaggcatgaagcttttcctgattttggccctctgctcatgcctgtatgtctccttgaagagcagctgggggcctgctgctgccttctgtacctcagattgtggtctgtcttcttcattattgccctctttttttttttttcccaggggtgtggatagggagggatagaagaagcagaaaagaaaggtgtcatccattattcatggaaagcaggactggccccgtagaagccccattttctgctcctggctgctgcctttgtctggctcgctgttgttttgtgtgttgcacctgccttgagccccttcaaccgaaggagctgttgctcaagtgtgctcggttgagcattgaggaaaagggccttagtgctctagaggtgcaattccctgacctcttggcattgattgtccctgggagagggatcttgcacctggcccagactatgcggccttggcaggagactagtattgcccacaattagtctattagggtttagtttattcagattttctttgtatctgagaccagctttcatcagaatgcatggcagagtcagggtacactgcagctctgaaggccattgccttatttttttcttttttaaaaattaacttactattttgattataaaagtaatataggccaggtgcggtggttcatgcctgtaatcccagcattttgggaggccgaggcaggagaatcgcttgaacctgggaggctttggttgcagtgagccgagattgcaccattgcactcaagcctgggcaacagaatgagactccatttaaaaaaaaaaaaaaaaaaaagtaatatgagcacattacgaatcacttaggaactagagaaaagtaaacataaatcctaaccttgccatcttagtattgccatcattctcattttaatatatttccttctacttatttttcatgtgcttttatatatttaaagtgattaccatctttctggtgtttcccatagctattttcttggattttttttttttttttgagatgaagtctcactctgtcacccatgctggagtgcggtggtatgatctcggctcactgcaacctctgcctcccgagttaaagcgattctcctgcctcagccaccgaagtagctgggattacaggtgtgtgccaccacacctggctaatttgtattttttttttttttttagtagagatggggtttcaccatgttgtccaggctggtcttgaactcctgacctcaggtgatccgcctgcctcagccttccaaagtgttgggattacaggtgtgagccaccatgcctggccaggaaagaattttttaacagcacatatcagcactactttatcagtcttctatataacacctcactgaagcataaatgtccatcaaacagggaagaaacgctctcattatattgaatgatcagagaatgatctttgtaaccactcaagtattttaagtggctgcaaatgacatgtttggtatccccttgtccactcctgatacctgacccagatgagaaggactcattagtgcagtggatagagcctggggacatctgggagatggagtcagggcctagatttgagttctggctctgccactcacttggctgaatagctgtgtgatttggaacaagtgccttaacatttctgaatctcgatttcctcatcgataaaatgggggcttaaaatagaaccgccatcacgggggtgctttgtaaactgtgacttgctcctgaaatgcagggatcatcatccgcattgcctcacttgtgaccttgcttgctggctttctttgtccctagcggatgaccaccaggctctcatctgggacatccagcaaatgccccgagccattgaggaccctatcctggcctacacagctgaaggagagatcaacaatgtgcagtgggcatcaactcagcccgactggatcgccatctgctacaacaactgcctggagatactcagagtgtagtgttggtggcgctgtgcccacgaggcaggggcttttgtatttcctgcctctgccccacccccaaagtaagaagaaacatgtttccagtggccagtatgtctttcattgctttgcacccactgttaccagaagctgctctaggagttcctggccagtcaccccatcgccctctgtggcagactcagtgctgtgtggcgcctcctcagcccagggctgagttttaagattttctctcctttcctcttctcctttggttcctcaattaaaaaatgtgtgtatatttgtttgtcaggcgttgtgttgaggagcagttcacgcactggctgtgtctattcctctgcccaggtgtctctgtttgctgcccaaggcagcagttcatgtctcgtccatgtccatgttcgtgttagcacttacgtgggaacaaataccaatttgtcttttctcctagtatcagtgtgtttaacaaattttaactttgtatatttgttatctatcaggctaatttttttatgaaaagaattttactctcctgcttcatttctttgtcttatagtcctccctctttgcaccttcttctcttccctcagtgcctggagctggtactgggcccctggccccatgagcagtttgccttcttgagtcactgcctgtgtagtacatacctgaccgggagtccaaaccaccttggtgctctgaagtccactgactcatcacacctttcttagcctggctcctctcaagggcattctgggcttgtaaacagacataggaagcctctgtttaccctgaagcaccactgtccagcccattggttcccactggcagcatggtagagctgagagaaacaggctctcagggtacctgacttgaggggaatcgtttcatgaagctgaacttcaagcatatttccagtacattctttcagagtctgtttttccatccaaatataagccccaggccattccacttagtgtcttttcaatgataggcaagaatgatatctgagttgaacttcggtgcttctgttgtttgagtttactgtgcctggtggtatattgggcattctttggattgagtgttctgaggtgagagagtcttcccgaggcatcctgtctgtgcttccaaccctgaacaagaccttacatgagagatggactgatggactgcggcaatcctgggctgtcaagtggatagatagttaaaaagcattatactgtgggtaatgaaaagggaggaaaaaaaaagaaggaaaaggaattatagacccccagggtcagccagttaagagctctacccacacctgtcaacccctctctcccccagtttaggttctgagcagtattggacttgtagcctgcagttgtcttttgacttgcaggccgcaggtgtctttctgttatgtgaatgagttccatggaggggcatatgtgtgattccaccgttagatgagcccttggggcaggcagtttgggatgtgctcttgggggaaagttggctgtttccttgcgctctgctcctacccgaaggtttttaagtccctctgaattgctcatctgagattagtagagtagcaggcctgaaggatgatggttttgtcctctttggttctcacctgcttgagaagtaaaacagtaactttgttcttctgggcccttaagcttttttggttaagtcttccttttcagaagtagatgtcattatatgccaaaagtctagctctttgctttaccatacagggacctgtcccaaagaaaaaggctctttttttagccagcatatttccccttctacccttttactttgttgttctgattttaggactctggctggccatgtgcttgtggttgcctctcctgcatttgccactggatttgcactgcatcgtttggagatacaaagcgagcagttcttggtcagaaccctcctctgcttttcattgtgtttgataatggttactgggtccttctctcaagggtagcaaggccaagctgatggctgcttgtttaggaggccatcagttccttcctgtggagaagggtctgaaatggaagtcagtggtagaaggggctggtctgctgggcagggcttacatccactgagttctaagattcctttcctgatctgcacctacgcctggtctgtatggtggaatttgtcagctggaactcagaaacaacaacttgaaaaaaaaataataattagaacatatttgcataagatagctatttactctggaaaccaacaacttttgagatttcccttgccctgtggacgcccagctcctgtcatccttccttaggtcctgcagtacagtcttcccctgaatgccaccggggacccagggggactccacccccctaagcaagcacacacatactcacagttgatgagttgctggtctttgagtcccagctctcttaccctccctttactccaccagcccgacgacccatgactgaggaggggatttctacagtctcaggatttagaaagtctgtaagccatccatgctccagaaagcaccgatctgttgtagttgcaaaaacaactctgtaatttgttgaggttctcaaactgacagccagcgagactgggtgggaggccctggatctgttctccctgactgcgggaggagcagccactaggactttagcaggaagcccacatggaggctccgccaggctgtggcccagctggtgatggcccttttgctcctggcagcctgaggcacagctgcctgtattgtcctcatctgttctgactgaaggatggaggtgctgaataaattaggcctcaggcctctaccaccagagagctggagaatgggtccacgtcattcaaggacctgaattttttatgctcaggagcattggaatcctcttcttccagggaggaattagcctgcaaggttaggacttgaagagggaaggtatttaataactgggcgaggatgggtgtggtggctcacacctgtaatcccagcattttgggaggctgaggtggccagatcccaaggtcagaagatcgagaccatcctggctaacatggtgaaaccccatctctactaaaaatacaaaaaaaaattagccgggggtggtggcgggtacctgtagtcctagctacttgggaggctgaggcaggagaatggcgtgaacctgggaggtggagcttgcagtgagccaagatcgtgccactgcactccagcctgggcgacagagcaagactccgtctcaaaaaataaaaaaaaaaaaaaaataggtgaaaattccttataaatccaggattggctctgagagaactggctaagattcaggaagaaacaaaaaattcagaatcctacaaggttttgatgacaattagggccaaaattttaggaggagatgtaggatgcaggagaaaattaaagtgttttctttatatcagaggaggaaatagtagaggtcagtgaaggtctggggtagggaaacattcagactgtccattgcatggctgtggagtgagactgcccttagcctgggtcagccttcctgggccataaattgggcatccgtgatgctaggtaactgtgggaacaaaatgacagcttagagcagccatgggtgatgtttggtggtaaaaaacctacaggcgtttggggtcccatgattgttccagaccatgactcttcctggttgtgggtttgttacagagcaggagaagcagaggttatgacagttatgcagactttccccctcctttttctcttttctcttccccttgcttttccactgtttcttcctgctgccacctgggccttgaattcctgggctgtgaagacatgtagcagctgcagggtttaccacacgtgggagggcagcccagtactgtccctctgccttccccactttgagaatatggcagcccctttcattcctggcttggggtaggggagaccattgaagtagaagcctcaaagcagacttttccctttactgtgtgtactccaggacgaagaaggaagatcatgcttgatacttagattggttttcccagggaagagggcggagcagagcaaagtcactgtgaaccctgggccaggccctggctgggccagctcctgagagcgtctcgtgttgcagacccttgcccacttcacccacctgcaccttctccccctctcacagtgtcactgctgctaatggtcaaagtcaaatgtgtggccacatgggatgggccaggtcctctcaggctactttctggatgtcatttttaaaatatggaaacatgcaggtgccttcccaaagaggcttggactggtatatccaacgagaaacaaataagctaaagaaagtttaaactcaagaagaaagatgttgacagtctatgtaacagctggaaagtttataggcacccacctttgggacaacccagtgattatgaacatgtgatatctactatttaaaagaaatgttctcaccttgggttgattgtggtataccatgtgttatgaaaattgttgagctgaagctttgaatcgatttagttgagtctgactcacttgctttggttcctgtgtattttactacccctcttgtcagtgaccttccttccccaccccacccagagtgaatttgtagcatgattgtataaacctctatgtagaaaatggagatttcttgctctgaaatgttaagctctaactgatccatttctgtgtcctttagcctagtatgtctgaacttccattcttgttatatatttaaactttccctctatattataggttttgtggcatccacggtcaggtgtagaggaagctgccccttgcagaactgtactgtaatatttttcttttataaatattttcacaggactgattgtacacagggcttgtaataaaattttaacactgtgctgtgaaacaactatggggaatctccattgaaggctacttcatgggcacctgaaagtggagtgttatagctatgactttctatttcttgtttcctaagtaaattaaacctaattttcaccctttcattctgtttcagcctcctgtataagaagtaccgtattttctgcccatcatactttgtaataaaacttgaacatgtatagattgactgaatttctttttgtgacgaattcagttcttcccattttgtcactttggtcatgttccatagacagtggcagtgccccagcccgagccgggcagtctactcatcaccttttatatcctatttagtcattcacttgttaattcagtggagcacctcctctatgccaggggacatggccctcaagttggttgcagtctaccagaggagacatctacataaatacttgtggccgggcacagtggtctgtgatcccagctgaggcatgggggtggctgaggtgggaggatcacttgaggccaggagttcaagaccagccttggcaacatagcaagaccctgtctcaatcaatcagtcatttttattaaaaaaaaaaaaaatttcttttagccagactaagatctaagacaaatctttttttttgcatttcttttttctttttttgagacggggtctcgctctgtcacccaggctggagtgcaatggcgcgatctcggctcactgcaacctccacctcccggttcaagctattctcctgcctcagcctcctgagtagctgagattacaggcatgtgccacaacacccgactgatttttgtattgttagtaaagacggggtttcaccgtgttggtcaggttggtctcgaactcctgaccttgtgatacgcctgcctcagcttcccaaagtgttgggattacaggtgtgagccaccgcacctggcatttattttattttaatagttttgggggaacaagtggtttttggttatgtggataataagtttttttaatgatgatttctgagattttggtgcacccatcaccggagcagtgtacactgtacccaattggtagtcttttatccctaccccctcccacccaaatttttaaaagacaaaaaacaaaaaaaccaaataacttgcattgttgtgcgataatggatgtgtttaggcatcacccctcaggaggaggtgatcacctctgcctgtgtgggagccacatggggtcagcgaaaactacttaagatggatgcctaagctgggttttgaaggctgagtaggagttatctggaaatagggaatgtcctttaaggcagagagaacacccatgtgcaaatctatggaggcaagaaagtatggtcatatttagagaattgcaggttgaggtggggtgaatagtgggaaatgtagctagagatgtatacaggagccagggcagggaaagtctcccgctttgcagaaattttagacattacacttctgtatgatcctggaaaacatacacagagaggagtcatcagaattgcattttagaaggataggcaatgaaaaagtgcctcttccttcttatagggtgagagaaaaaccctgaactaaggcggcggcggcagcagcagccacggcaaggatggagaggacagggcacaagtaaagagggatgcagtcatcagcatttagtaatttattgattgtgaaggaggacagagaaataactcccagatcttttggatttggacaggttctgatggctgactaggaatgtccaagtccctgctaatttcccaaacctatgccccacacggtagggtgggggagttcctatcccactgctcttcaaatgctgtgtgtcctggatgaaatactacccccatttatttatatttttattcttcatgttgggccactgtgaaggaagagaagaaaggcaaactgattggttccgtgaacctgtattcggtaagtacctgccattgtgtcagctgatatggagccggtggcagtggatctgtgaagggaagtatgtgctcttgagaatttaattttttttttttttcagacagaatttcgctcttgttgcccaggctggagtgcaatggcgcgatctcggctcatcgcaacctccgtctcccgggttcaagcgattctcttgtctcagcctcctgagtagctgggactacaggcatgtgccaccacgcctggctaattttatatttttagtagagatggggtttcatcatgttggtcaggctggtctcaaactcccgacctcagatgatccacccacctcggcctcccaaagtgctgggattacaggcgtgagccaccgtgcctggcagagaatttaagttttatgagtacctgctggtcctttggaactgtgctgctatatggtctgacaatgtatattttgtgagaaacacatgagtcctgctctctggtttttaaggagaaaacagagagtaatactatttataggctagcctatgctgcggcaacaaacccccaaatctcagaaactgagcactacaaaagcttattttttgcttacacaaagtcctctgggccgggtgcagtggctcaactctctaatcccagcactttggaaggctgaggggggagggaggggcagatagcttgaggtcaggagttcgagaccagcctggccaacatggtgaaaccctatctctactaaaaatacaaaaattagctaggcatggtggcacacgcctgttgtcccagctacttgggaagctgaggcaggagaatagcttgaacccgggaggtggaggttgcagtgagccaagatcgcaccactgcacttcagcctgggcaacagagcaagactccatctcaaaaaataaaaataaacgtgtgacctccaggttgcttatggggggtgggagggagtacatttttcaggatgggccgggaagtggcttactcacttttgctcctatctgccaactgcaaggaaggtcaagtcaagaaatgtagtcttcctgtgtaccctggaaaaggaagtgaagtagtgaataattatgtctcagccatactagcaaatcggctaagtatctggactaataactaatgtaatctcattcattgagagctgttagtactggacaacacatggtcaaacctaatggaatgatatttgtagccagtctttagcttccaaggctcattgttacttaagtgatttcagtgagcctgacagccaggcgtctagagatggttcagtcaactatgaatttatcttgaaaggtggctattaactcagactgagagttaaaatctgccctgccattcatcacagatgcacagacagataaaaccagctgcacagttaacaggatatagtacctctatcaagaacacactgcaatttttttttctttttttggcaacataaagtgtcaaaactccctgagtgactactgttttaaaaaaattcactgagaaatttcgttctccaaaatcataggctgacaaagtttgctgtttgcaattgtatttgtgagaattaaggcttatagtcagtcttgcttggaggagctgagtcactctgacagagaagcagccttgatttccaggccaggtattgtgcttcagagcaggggcttctgaacacaacagtccacatttaccttgactttgtactttccagggaaactgatcccctgggtccacttggtagtccagctgatcttaatccgcctttcacacaggtctgtgtttctttgagcctaactctaatttttcacctaacttccacccttccccataattctatgaccagttttttcttcggtaagacacttcaccattcctctggtgtgcagtctcccttgttgcagtgagttgataagcctaactctgtgagactataggtttcccttgctggtctcaggctgactggactagggcagtctcaaaccttgttttagcctctacacttatttgtgattacaaattccattaatttgatttttgcttctcaaagtaaatattacatatatatttttttctttttttttgagatggagtctcgctctgtcaccaaggctcaagtgcagtggcgcgatctcggctcactgcaacctccgcctcctgggttcaagcgattctcctgcctcagcctcctgagtagctgggactacaggcgcgtgccaccacacctagctaattttttgtattattagtagagacggggtttcaccgtgttagccaagatggtctcgatctcctgacctcattatctgccccaaatcggccttccaaagtgctgggattacaggtgtgagccaccatgcctggcctgaataaactatttttaaattgcaaaaagtaatactatatatgaatggctgataagcacatgaaaagatgcttaccattagtagtcattcaggaaatacaatcaaaaccacaatgagataatacttctcacccacaaggatggtgataactatagtcaaaaagaataacaaatttagccagtggctcacacctgtaatctcatctacttgggagactgagatgggaagatcacttgagcccaggagttctatgctgcagtcagctatgattgctccactggactctagcctgggtaacaaagcaaaaaaaaaaaaaaaaaattcatgatatggagaaattaaaccctcatatattgctggtgggaatgtaaaatgatacaaccactttagaagacagtctggcaatcccacaaaaggttaaacatagttatgatatgacccagcaattccactcctaggtatataactaaaagaagtgaaaacataggtccacacagcaatgtgtacatgaatgttcacagcctcattattcatcatagaaggtggaaacaaccacatgtccattgcctgatgaacagataaataaaacgtggtatattcatacaatggaatattatttggcaatagaaatgaaatactgatacatgctacaacatgcaagaatcctgaaaacatcatgctaagtgaaagaagccagttaccaaaggccacatagtgtgtgggcccattcatattaaatgtccagaagaggcaaacccacagagacagaagtaaattggtgattgcctagggctgtgggaattggggggaaatagggaatgattgctaatgggtacaggacttcttttggggatgatgaaaatgtaaaatcaattgtgcacagctctgaatattctataacacattgtacactttgaattggtgatctgtgtgatctgtgaaatatgtcaaaacttaattttttaaaaaatgagaactgtgttgggcataggaagtacagtcctactctcagagaatttagtattacggtagaaacagatataaacattttgatatttttttaaaaggtaagtgctaaggtgcaagcatgtatgaagggctatgggcacccaccgcacctggctaatttttgtatttttagtagagacggggtttcaccatgttgaccaggctggtcttgaactcctgacctcaagtgatctgccagcctcggcctcccaaagtgctaggattacaggcgtgagccaccgcacccagccccatggaggttcttatataataaaaaataaaaaatctatgcttttgtgctttgcatccattatcccatttagtcctcacaaggccattctatggtaaggaaactgaaacaggaaagtaaaggaacttgcccaaggatacactagaaaatggaacaaccagggtttgaagccacccagtctaactgcagagggcacaaacttggacttcacactgtcctgcttctctctctctctctctctcttttttttttttttttttgagttggattctcgctctgtcgcacaggctggagtgcagtggcgcgatctcggctcactgcaacctcctcttcccgggttcaagcgattctcctgcctcatccttctgagtagctggcattacaggcgcgcgccaccacggccggctaatttttttgtatttttagtagagacggggtttcaccatgttggtcagactggtctggcactcctgacctagcgatccgtctgcctcagcctcccaaagtgctgggattacaggcgtgagccaccgcgcccggctgtcctgcttctctacctgatatgtcatgccctttggacttaatctcaccagcatgggagtcactacaaagcttttcagcagctgccgctttgtttctctccatcttctaacggattcggttttctctttcgagacagcagagagaaaatgaagaggggagtttagctccaaagggcttgtctgatcattctccctctcccaaaggcctgtgactcatctgagtctgtcccaaaccatctcttgcatctaggggcttaagtgcactgtggctatttacataaaactttattactttaaagctctaagggctcattttgtgtttctaactttcctatgttgataaagcaaatattagatccttatttataaatagggaagacgttcagagagattaaacatttgggcaattcacttctctggcagcagtttctttcccagtacaatgaggcaacaacaaaatatcattctggacttgctcagatttaggcagcaatttggaagcaaagtcagtttcataactcagatgtgtctccactaaaacattatgagaaacaaagtccggcgctctctaggcaaccgtgagggcttgagcactaactagatctgctcaagggcaagagaggagcgagtaccgtgcagccacggaacggactttgcgggcagtggggacgtgtttttggagcgaacccggtaaaggaagtgtgctacgccatcaagggcccccagtcccgggtgccgcggggacagtgtagggtcattagctgttgagccgccccgggcgggcccaagcctttggatctcaggtgaccggcacaggcggccgcggggtccggaactgcttgttccggcagtggaagagacgcgccggcgttggccgctgctgctagcagcttgaaccccagggtcgggaccgatgtcggcttgggctgctgccagcctaagcagggccgctgcccgatgcttgctggcacgaggccccggggtcagggcggctcctccgcgcgacccccggccctcccaccccgagccccggggctgcggtgccgctccgggcaggacgctgcactttaccgcggctgtccccgccgggcacaacaagtggtccaaagtcaggcacatcaagggtccgaaggacgtcgaaaggagtcgcatcttctccaaactctgtttgaacatccgcctggcagtgaaaggtgagaccctgacggtcacccagcactggctgccgctgccctctcagtgcccgcagcctcgcttgcctctcggaattgggcccacctagatctccggcccttcactttgttttccttccccagtacccaccattgcccacctcataaatcctcaaaacacctaccctacgttggaggttctcactcacttttccagacgctgagcatctggccagtttgtcagagagggagctgctcttaagaagataagccggtaaggtagaagtgacttcatcctaatctagctgggtacttaatagaaacaagccctaagagtcagggcagatgtgtgtctctcctgaagagacaaatcaacccctctgaagtcgcctcaagtaccttattggttgtggcaggggcactgagtaaagctattacttaagtgcttaggccttagcttaggccttagtttgcttcattaatgtttccccaagacacatttccttggaaggtagatttgcagccatgtcttttctcccttaggtcgccacactgaaaaggctttttttctgtttagggccagacatctgtaggagcaaaggaaaagtcctgtagaaagcatggactttggactgggcgcagtggcacagcctgtaatcccaggccagaggcaggcagatcacttgaggtcaggagttcaggactagcctggccaacatggggaaaccctgtgtctactaaaaataacaaaaaaaaaaaaaaaaaaaaacagctgggcatggtggtgcatgcctgtaatgctggctactcgggaggctgaagcaggagaattgcttgaacccaggagttgaaggctgcagtaagcgagattgctctactgtactccatccagcctgggtgacagagcaagactccatctcaaaaaaaaaaaaaaaaaaagagagagaaactgtggactttggagtcaggaagactggtttctgtcactgactaaccttgaacaagtagcttaacttgagtttctctgaaacaaggataatacccaccttgaggtagtttatggtttatggcacatcataggcattcagttaatgttaatttaccccctcagctcatgcctggtatttgtttgcttccttttcttcaaaattcttgatattaagttcaagcaacttttatttatttatttatttatttattttgagacagagtctcactctgtcacccagggtagagtgcagtggcgtgatcttggcccattgcaacctccacctcccaggctcaagtgattctcctgctttagcctccggagtagctgggactacaagtgtgcaccaccatgcctggctaaatttttttgtatttttaatagagacagggtttcaccatgttggccaggctggtctcgaactcctgacctcaaatgatctacccacctccacctcccaaagtgctgggattgcaggtatcagccactgcatcccaatgaagttcaaccaacttgtgtttattttgtgccaggcatgccattggtactagaaagatgatgagatacagcccctaccctcagatcacaatgtcatgtgaacatttcaataattatgcacaaagtgctgggcacggtggctcacacctgtaatctcaacactttgggaggctgaggccggcggatcacgaggtcagatcgagaccatcctggctaacacggtgaaaccccgtctctactaaaaatacaaaaaaattagccaggcgtggtggtggcgggcgcctatagtcccagctactcaggaggctgaggcaggagaatggcgtgaacccagaaggcggcgcttgcagtgagccgagattacaccactgcactccagcctgggcaacagaggaaaactctgtctcaaaaaataataataaaaataaaataaaataaaaataattattatgcacaaagtagtagagtaagagcagtaatgagtccaggaagtgttgttaccatctataacccttcttcatctgacacaaagtagagatcgctgaaacctagcagaatgaaaaccatccctaaagacaatgaattagaaagttctggccaggcacggtgcctcatgcctgtaaccccagcactttggaaggccaaggtgagtggatcacttgaggtcaggagttcgagaccaacctggccaacgtggtgaaacctcatctctactaaaaatacaaaaattagctgggcatggtggcagacacctgtaatcccagctacttaggaggctgaggcaggagaatcccttgaacccgggagtgggaggttgcattgagccaagatgagccaagatcatgccactgcactccagcatggatgacagagtgagactctgtctcaaaaaaaaggtcttttctggccagacatggtggcccacacctgtaatcccggcactttgggaggccgagtcaggcagatcacttgagctcaggagtttgagaccagcctgggcgacatggtgaaaacctgaatctacaaaaaatacgaaaaaaattacctgggtgtggtggtgcacaccagtggtcccagctacttgggaggctgaggcaggaggatcgcttgaaccctggaggttgaggctacagtgagctaaaatcatgccactgcactccagcctgggtgacaaagtgagactttgtctcaaaaaaaaaaaaagtacttttccaaaatacttatccaggccaggggcagtggctcacacttgtaatcccagcactttcggaggccaaggtgtgtggatcacctgaggtcaggagttcgagaccagcctggccaacatggcgaaacctggtctctactaaaaatacaaaaattagccgggtgtggtggtgtgcacctgtaatcccagctactcaggaggctgaggcaggagaatcacttgaacccaggaggtggatgttgcagtgagccaagatcgtgccactgcactccagccagcaacagagtgagactccatctcaaaaaacaaaccaaaaaaacccgaaaatacttctccgtatcccactgaaacactagttaaggtattctaaggtaactgagagctaaatggtgatttgccactcctttggcttggtggggctggaaatcccttttattctcccatgttgtaatgagatgtctttgctcactcttttttttctttttctttaaatctcagaaggaggccccaaccctgagcacaacagcaacctggccaatatcttagaggtgtgtcgcagcaaacatatgcccaagtcaacgattgagacagcactgaaaatggaggtgtgtactgtttgacatgctttttattgatcacagcctctaccgggctcatgtctggatggccaacaaacacactgtaaattatcagaggggccaagtgcagtggctcacgactataatcccagcactttgggaggctaaggtgggtggatcacttgaggccaggagtttggagaccagcctggccagcatggtgaaactccatctctactaaaaatacaaaaattagctgggcgtggtggcatatgcttgtaatcccagctactggggaggctgaggtggaggatcgcttgaacccaggaggtagagattgcggtgagccgagattgcaccactgcactccagcctgggcgacagagcgagactctgtctcaaaaaaaaaaaaaaaaattatcagagagaacggtagcaatgtagttgacgccctcagcctagagtcttctgagagctcaccgtccttggtcattggttctaggagcacaactgggagtaggatgcataggcagtatgcagggccatacagtcaagaccgggactgctcagccaagttgtagggagatgaggtattatagaaagaaggggcagtgtgggagaaagcccttacgttaggtggaggaagtgtttgtttttcagatgtttatgccctaaaggagaaaagccagtagaaagggagaggatgggggtgatagagatggtgggaggggcaggtatatagagtccacgtaagggtacacctttctctggggcaggtagggaggctctgaggaagtaatagttatcttaatagctcaaaattattgagtgcttcctgcaggctaagcatggataaaaactctatgtgtgttatctcatcgaatcctcaaaaccaccgtaagtagaaactgaggcacaggaatgttaggtgagttgactcaagtcgcatagaaaatgacagacttgaaaccagatagtcagactttagagcctgtgctctaaccgttatgcttattgccttcatgtaggccatggtgcagagaaggtggtggagacagcaactattttccccacctagtggccctttttacctttgtgaaagaggaagggagaagttatgagttgagaattcctggaaagttgcaggacagggtgcttggagtggggaatattgaatacatggacaagggatgagtaggggcatggaaggtccagaagagattagtccctagagctctggattaattgtttcaattttgagaccatgctgttttcagcagctcttacgacaaggcctaggtgtgtgatatttcacagcagtactcagcagcccagggtagggaccttgagacttgaccggtgggtttcttacaggatgggggtgtaggaggatgagtctgagtgggattgggtagggactagatgtggcatttggttagggatggtaggaagcaaagctgagagatggctgatggattgttcagggaccggagaaacagactccttccaagttaggggtagtacttcctgttacctcaaaagttggttagagggtggggacaaaaataaagattgagagctcaggctccagcctagagagcccatcccatggagttagttttgcgatacttgtagttctgggctgacatgtgggaaggaattgggaaacaggaaaatgtgcttgtgttgtttattgcagaaatccaaggacacttatttgctgtatgagggtcgaggccctggtggctcttctctgctcatcgaggcattatctaacagtagccacaagtgccaagcagacattagacatatcctgaataagaatgggtaagtgtgcgtctgggaggagtggtaggggacagagcctttatgttccaattctctgcaaggcaagtactgttgatctctgctagtgtttcagggttttgttttttgtttttttgttttttgagacggagtctcactcttgtcgcccaggctggagtgcaatggcatgatcttggctcactgcaacctctgctttctgggttcaagtgattctcctgcctcagcctcctgagtagctgggattaaagatacccacagccatgcccagctaatttttgtatttttagtagaggtgacagggtttcatcatgttggccagactggtctcgaactcctgatctcaggtgatccacctgcctcagcctcccaaagtgctgggagccaccatgcctggccatgtttcaggttttaagcacacttgctccttagcagaatctaatgagttaattgactttcccttaatgtagtttctactagcaggatcccaaagacttgttcatcggatgtagaaggggatctttgtcctattatccccatctgtagccatataatgcctaagtcttaaaatgctccaccaggactggcatcttaatggcacaggaaattatcagctaagtctgcttcctcccaactgcaatcagggcagaaaatcgagcgtggggacattcttgggctgttcccttacccagcagcagctgcattttctccttgaggatgcgatctgctccatgtctgtgtgtacttcatagactgggtaagaaagagacagtgatagaatgatgagctttatggaggctgagcttctagaggcatccactcatgccagcctgtttccttccctgtcagaggagtgatggctgtaggagctcgtcactcttttgacaaaaagggggtgattgtggttgaagtggaggacagagagaagaaggctgtgaacctagagcgtgccctggagatggcaatcgaagcaggagctgaggatgtcaaggaaactgaagatgaagaagaaaggaacgtttttaaagtaagcatgaaaacatgggtgtttggtgggcttccgggaggaccctgatagatgccttatgcatgcctcttggtttcttccttcatgtgccccagggtataggtgagacagttcacatattgtacaaacatttattaagtgaatactgaataggaccgactctagtgaggactatgagaaagaaagagtcaaaacattgaaaacgatgtccctgccagtgaagagctcaaacccagtgatccattccagtactgacattcaggactttgcaaggtcctgtgtggctttgtctcattacctcctggctcctcacctcctgactttcctttatccctagtttatttgtgatgcctcttcactgcaccaagtgaggaagaagctggactccctgggcctgtgttctgtgtcctgtgcactagagttcatccccaactcaaaggtgcagctggctgagcccgacctggaacaggccgcacatctcattcaggctctcagcaaccacgaggatgtgattcacgtctatgataacattgaataaccaggctacatgtgcccccgggttccttcctagaaatgtggcagcccattccagcacacaggcttctgcagcaatctctgagggtaaagccggtgggaggctcagcaggccaggaggcccaaggacaggacttgcgaccttgaagccaaaggaatctcacttgtggggcctccttgtcagctctgctgctgtctcagagccatctggatgagtgtcccgacaccctctcggatgcagggcaggaccacccagctggtcagactctgatgttgggtagctggcctctgtggggattgtaagtgccctgaggcgctctgtactagaaactgctcttaataataacggtgattattggttgctgcattgctgttgtatggctcttgagtcttcctgagtttgtgtccagctgttgggatcctctggactaactttcaagtccctaggcttagctctactactccaatcccaggattatttttttaattggccatagaaatgtagttgtatccaggcactccatggtctgatgctggtcttacagcctaaacctgtcattcattcatgcaactaatatttctggaacactagctatataccaagaactgtacttatctagagcataagctattcaactggtgtcctgtgttagatcctgctctagaaggtaggacctgaacacaggactgctctttactggagctgtcccagggcagtgtgagctgctgtgcaagcatctgttgctctctttgtgtgacttctgtgcccttctttcaccaaacagcttaaggttctagcccagtaggaaatcaagtgccagtgataagggacttggcagtggctcacacctataatcccatctactcgagaggctgaggcgggaggatcacttgagcccaggagtctaaggctacagtgagctatgattgcaccattgcattccagcttgggtgacagagtgagaactcttcttttttttttttttttttttttttttgaggcagagtctcactctgttgcccaggctggagagcagtggcacaatctcagctcattgcagccttgacctcctggactcaagcagtccttccacctcagcctcccaagtagctagaactacaggtgcatgccaccacgcccagctaatttatatatatttttgtagagatggggtttcactatgttgtccaggttggtgtcgagctcctgagctcaagtggtctgcacactcggcctcccaaagtgctgggattacaggcatgagccaccacgcccggctgagtctgtctcttttttttttgagacagagtcttgctctgtggcccaggctggagtgcagtagcatgatcttggctcactgcaacctccacctcccaggttcaagtgattctcctccttcagcctcccaagtagctgggattacaagcaggcaccaccatgcccggctaatttttttgtggagggggaggggagaaaattaaactttatttatttttaaaagcaaaccaccgggaaaatataacacagcctggaagcagcaaatggacaggctatattatcatttcaagtagtaagttgatgaaaatacaatgaggttgctatcaaaacaataacgtgccatgccggggcaggaacactgcaagttgcgaaagccccaggcaaaaatggtttttggtactggggtctgcctctcctttgctataagggagtcagctcatcctagcccaagttgcttactttttcttccttggatttcctgttgccagggtttgtctcaattgtgctttgttaattcagggggctaagtaggcagtgctaggtttaggctttcattccatccgttctataaaaaccaggtttttccaaatccagtacttcataactctgttataatcaagtagccaactgctcttcttttactgttcatttctagatactagtatatatcacaatcaaaacccccttctcttcaccgggaaagtgttactgcaagattgtcctgtcattttgctacacacagcctcggcccatcagccagtaattatgcttcccataattagtatgtcatcacctctcatgtttttgcatggtctccaggctgaaagatgcagcatgtaataattttaagaaatctacatctacatcttgatgaccagaaatggggatcctcaaggaaactttcaaagttcttatccaaactagtctccctcccaattccacatcttaaaatcaatttgtatcgccttgtataaattacacaaaaccaagaaaacaaagacccagaaaacttttttgcccttctaagcgggtgacctcatggattttgtttcacagcttacggaaaatggtgtggtgacacttctggtaaacaggatgttggcaacaaagagaaaatatctctcctcaaactccaccaactctaacctgccagcctgttggtacctgtgtaataagaagagtttagtgccttggagggctctggcttgttacaggggagatccttactggcaggacaagcactggccataggatatataagctctaaaactctcctgtaatatctctgacccaatttagcaccacttttttccatttcattttttaggactgaaacataaaagaaccagtgtccagaggcaagtgacatatgtcttacacttgtggccatccttcatttcttcataaactttgcttaaaagactaaaattcccaattccttataaaaaatatattcttgccctcagccccagtggccactggcaaagactgttatttcccaatggataagagagcctccttcatcttcttggccatagttgggatgaggtgcgtgtggtcatccacacacttggtcacacaaccgtccagctgctgcttcacctgaagctccttactcccagtatccattgaatctttggctttgttgttgcaatgcatggcgcaccgggccaggtggtgccggaacttctccaactcactggtgagcaaagcccgggcttgagccagaggcacatggcagtgctttgatgtactggtgcacctactgcatggaggcctggctgtcctcacaacagctggtgctgcaccggaacatgagaccctgcatcttccagatgttctctctctccagactcttcaccatggagtccaccacctcctgcacccacagctgctgcagctctgccatggcgtccccataccgccctgcaccgtgccaccccggctaatttttgtatctttagtagagaccaggtttggccatgttggccaggctggtctcgaactcctgaccttaggtgatccgtccatcttggcctcccaaagtgctgggattacaggcatgagccatggcgcccagcctctgtctttcaaaaaaaaaaaaagggacttactagggcctgctttgcctgggtccctatgcatcctgggattggtcagagtgaaccaatgagaagactgagctgctctcaagaagggctaccacaagctggttttgaaagcttcttggttctgagaacaaccagccctagatccttttcatctctgatgccaaatgatgtggcactgagaactgaagaggaaacgtgaacagaaagaagagtgagggctgaataagaagcctcgccagtgggaaatagggcccttggtaccttttgctcctaatagtcacatctgtgtttagaagggccaggaactcccacctcctgcgtcagagcctgtcaagcatgtcaggcctagagtggctttctgatccctgttatacacctatttataagttatctaagctaattctgagctcagagtaattttcctgaaggagcttcaggtaaataaggatgacaaagaactaaaaccaaatttactgtaaatgataacttcagcttctaagaaaagaattactgactccacactgatgtcaatagctggagagcaagggctacgaggaagaaaaccagtgaaataatccatggtcatgccacttgcccaaatatctgaattgcttatcattaaaaaagagcaaatttacgtttatatgtggcttcataatttgtaagatacgtttacatgttatttatttgattttcccaacaaacctataaaacactttggccaagtattttatgcacaaatgatctcataccaagcaggaaagaacaggtcttacactgatagaccttggtgtttataaaatagctctgttttggaaattaatttggaggaatcttatttataatctgagaaatctgtactaagggagtctgctcttaaagggaacatggctagtcatgtgaatagatctctaatgtagcatatagaatctttattaatatggattgttgcataaccaattatcttacatcaagacatgcttactgtaaggcacagtaaaggctcctgtgatgatggctctgcactgacccctagtggtgccctgcagtctctctcctgcagttaataggaaaggcagaaatgaacccttcttgaatttgttctgctgtctctagatctggaaaagagaccctgagctattcaaataaagatggtcacggccgggtgcggtggctcccgcttgtaatcccagcactttgggaagccgaggcgggtggattacctgaggtcaggaattcgagactagcctggccaacatggtgaaaccccgtctctactaaaaatacaaaaattagccaggcatggtggcaggcgcctgtagtcccagctactcaggaggctgaggcaggagaatcacttgaacccgggaggtggaggttgcagtgagccgagatcacaccattgcactccagcctggggcacaagagcgagactccgtctcaaaaaaaaaacattaaagatggttacatccatatgccaaggtattatgttgccactaaaaattattttttaaagaatcttttgtcagagaaaatgtttagaatataacattaagtgggaaaaaagatacaaaactacatgtatagtgtggtccaaattttgaaatagatatgtatatatttatttaacatattatatatatgaactttttaaaaaagactagaaggaaatgtactaaaatatcaaaacaggttatctcagggtagtgatgttattactgagctttatattctgtaatcatgttttccttttttctttctttcttttcttttcttaagagatggtgtcttcccggccgggcgcggtggctcacgcctgtaatcccagcactttgggaggccgatgtgtgtggatcataaggtcaggagttcgagaccagcctggccaatgtggtgaaaccccgtctctactaaaaatataaaaattggctgggcgtggtggcgggcgcctgtaatcccagctacttgggaagctgaggcaggagagtcatttgaacccaggaggcggaagttgcagtgagccaagatcgcaccactgcactccagcctgggcgacagagcaagactccgtctcaccgaaaaaagaaaaaaaagagagagagagagatggggtcttcctgtgtaaggctggttttgaattcctggctcctagggatcctcttgcctcagcctcccaaagtgctgggattataggtgtgagccactgtgcccagcccccatgttttacttttatcaggtgacataattaaaaaaaaaccaaaagctagtctcacagcatctgagagtctgggagtcagatgcatgttaaagtcagaggaatgaggtccagtgctggcttggcttgctttgccttatctttggttattgtcttagcaacataaaattattcaaggtcttgaagccaccttgggcttaccttcaagtgtccttttagtgggacagaagtatctgtgataggctctgttcacagtcttgactgttataagaagcactcttgtgcgtagccacctcccctctgctagaggccctggctgaatccaagaggaacagcaaaggctgtgcctccaaccaactgtggaaattcagccatgtggttgagttacttttttttctctgaaacttatagcagtcaataaattttcaaactcgaagagcccccaattcccagacttatttgaatccccaaagacacttctggagacattctcttcacagaaaataagtctggcaaaagggaatgcgatgatagatccacaatactctttttcttttccttttcctttcctttctttctttcttttcttttcttttttttgtgtgtgtgtgtgtgtaacagggtctttgtcagccaagctggagtgcagtggcacaaccatcgctcactgcagcctcaacctctcaggctcaagcaatccttctgcttcagcctccttgcatgccaccatgcccggttattttatgttttgaagagatggggtattgctatgttgacagggctggtcttgaactcctgggctcaagtgatcctcccatcttggcctcctgaagtgctgggattacaggtatgagccatcagcctggtgccacactactcttaactgaaattattctatgtccagccagtgaacaggatagcatttttacttctttgttctttttattttttgtgtatgcccaaaaggtaacatttattgtctttaaaaaggcaaatcttacataaataaataacaacaacaacaacaacaaaattcccatttaattctacctcctaagatacaaccaccattaacgatttatattttttcactctttggagccagtctgctagggaccaaattctagctctgccaacagctagcaaccttggacaagaacttaacctctttgtacatgcttctttacctgtaaaatgggggtaatgatagtaccgattacatgcggctgttttgagaattaagttaatatatgttaagcacttgaaacagcacctggcaatagttaagtgttcaataaatgttggcctttttctaagtgtgaatgagcattttttttttcattaaaaaatttttttggccaggcatggtggctaatgcctgcaatcctagcactttgggaggccgaggcaggtggattgcctgagctcaggagttcaagaccaccctagggaaaacatggtgaaacacaacatctactaaaatacaaaaattagctgggctgggtggtgcttgcctgtaatcccagctactcgggaggctgaggcaggagaattgcttgaacccaggaggcagaggttgcagtgagattgcaccactgcactccagcctgggccacagagcaagactctgtctcaaaaaaaaaaaaatttttttttaattgatatgggatcttgccatgttgcccaggccagtcttgaactcctgggctcaagtgatcctcccagcttgacctcccaaaatgctgggattataggtgtgagccaccttgcctggccagcttcttttttttttttttttaaatagacatggagtctcagtatgttggacaggcatatcagggtcttgatacgtagttttgaactcatggcctgaagcaattctgcctcagcctcccaaagtgttgagattacaggcataagccaccacacctggcctgaatgagcattttttaaaactgaaaagtgatcatgctatatactttgctttaaccttttttttttcacttcacaatacatcctggttaccttttagtattagtatggagaagtctcttcattctttttaatagctacataacttttttggtattaacgtgtcataatttaaccagtctcctatcaatgggcatttggattgtctgttttaaaaaagatgctagggccgggcatggtggctcacacttgtaatcccagcacttcaagaggctgaggcgggcagatagcttgagccgaaagagttcaagaccagcctgggcaacatggcaaaaccctgtctctacaaaacatacaaaagttagcagggcatggtggtgtgcacctgtagtcccagctacttgagaggctggggtggaaagattgagcccaggaggtcaaggcttcagtgagctatgattacaccacttcactccagcctgggtgatggagtaagactctgtcttcaaaaataaaatgaaaataaaaagtcaggtgtggtgccatgagcctgtagtatcagctactgaggagactgagacaggaggatcccttgaacctgggaggttgagcttgtggtaagctatgactgtgccactgtactccagtctggaggacagcaagaccttgtctcaaaaaagaattttcggctgggtacagtggctcatgcctgtaatcccagcactttgggcggccaaggtgagcggatcatgaggtcaggagattgagaccatccttgctaacacggtgaaatcccgtctctactaaaaatacaaaaagttagccaagcatggtggcaggcgcctgtagtcccagctacttgggaggctgaggcaggagaatggtgtgaacccgggaggcagagcttgcagtgagccgagatcacgccactgcactccagcctgggtgacagagcgagactccgtctcaaaaaaaaaaaaaaaaagaagataaaatactgcatatacctaaaagggaacattatggaaattacattcagttactaacatctccatttgaggttcacttactcatttgacaaatatttgttttttaatgtgctatgaaagatgagaggcatgctgatttgaaagcagcttctgtctttatgcttaatttggttgttttgttttgctttgttttgctttgttttgttttgtttgagggtctggccctgtcatctaggctggagtgcagtgataggatcatagctcactgtagccttacctcctgagctcaagcagttctccaacctcagcttcttgagtagctaggactacaggcacacgccaccatacctggataattttaaattttttttgtagagacgaggtctaactatgtttcccagactggtctcaaactcctggcgtcaagcaatcctccctcattagcctcctaaaatgttaggattatagacatatgagccaccacacctggcctttttatacatacttggttaaagacaattattagcaggacacatgctttgatgaagaaagtacccagtgctctgacagcatgtctgagggccttaacccggacttggagttgtctgtctgagaaggcttcctggagaatgctgtataggcttagctcttccctgaaagaatggaggtgggggctgggcgtggtggctcatgcctgtaatcccagcactttgggaggccgaggcggcagatcacgaggtcaggagatcgagaccatcctggctaacgcggtgaaaccccgtctctactaaaaaaaaaatacaaaaaattagccaggcgtggtggcgggcacctgtagtcccagctactcgggaggctgaggcaggagaatggcatgaacccggcaggcggagcttgcgtcactgcactccagcctgggcgagagagcaagactccgtctcaaaaaaaaaaaaaaaaaaaaaaaaaaagaatggaggtggaagcagaagcgaagaggatttcatgcagagaacatagcacacgcagaggtatagaagcaagagaaattcacatttgaggaattgctggtggttctatgtggctggggcatagaatttgaataatggggttaactattatagttaaggtggaaatagaaggacgtgtggctgaagaagaaggtatgggttgggtcctgaaggaccttcttaactacattcacatatatgacttatcctaagggtgatgggaaactttttagggagggtatggcagaatcaggtgtccatttcagaaagatcaatctgtgatgtgaatatatgttgagaggctgttacgcttaagtcatgcaggtaagagattttggtggtttgagctagggtggtaaaatgggatgggagagggatggacagattggagacttgttcaagactggctgtgggggaaagaaatggagagaaagagctatctgatcattcgaaggtatccaacttgggaaactggagagggacagagaaaatacagaactatgggggaaaatggtttcagtttggacccaaaattggaggttcctgtgggacacccatgtctgtggagttcagaagaaagacatccctgagctagagacacagttgagattctggaatcctcagcgcatatggtaactgcagtatgggaatgtttgagatggctggttgagacaccgacagtgcaaatgaagccacaaagaaggcagttgtaagaaaggtagaaggtaaatcagaaggttgttttcagctaaagactcaggtagatgtactgcggttctccatgtgtgaggcactattctaagtgctggtgatagagcagtaagcaggacaaaattcctgctcctgcataccttatgtttgtggtagttggagtagagcaaacaaataaatatataattttagccactgagaaaaaaaaacaaggaaaaaatatacaaatacagaatgatggaagggaggggtcattttggatggggtgataagaaatgacttaaaagcagacgtttgagcagagacttgaataaactgcagaaatgagaacatcttggcttggtagtttcaaagaatggaaagaaggccagagtagctagaggacagtgatggagggacaggatggaggggccagctcctattgggcttggcaggtcatgacaaagaattggggttttattctgagtgtgatgggagggaagccattggagggctgacagtgggcagggggtagggtggcgtgatctgaattacattttacagggatcactctggttgctattggggaatcatttgttgggctgccacagaggaaacaatggaggccagataggagtctggggcagtcattcaggagagtaggtggtggcttggataaggggggtgggatgagaagtggttggattcaggtgtgtgtgtgtgtgtgtgtgtgtgtgtgtgtgtgtgtgtatttttattgtattttttttggagacagggtttcactctattgctcaggctggagtgcagtggcacaatctcggctcactgcaacctccgccttctaggttcaagcgattctcctgcctcagcctccaagtagctaggattacaggccaccacacctggctaatttttatatttttaatagagatggggtttcaccatattggccaagctggtttcgaactcctgacctcaggtgatccacctgccctggcctcccaaagcgctgggattacaggtgtgagccactgcgtccgacctgattcagatacattttgaagtgggagctgaaaagatttgctgcatgtttggatatatgggtgtcagggagagagaataatcaaggaacactcctaggtttgtacagagggtctctgacttactatggttcggcttataccttttttttttttttttttttttgagatggagttttgcttttgttgcccaggctggagtgcaatggcatgatcttggctcactgcaacctctgtctcccggattcaagcaattgtcctgcctcagcctcccaagtagctgggattacaggtgtgcgctaccacgcccagctaattttttatttttagtagagatagggttttaccatgttggtcaggctggtctcgaactcctgacctcaagtgatccacccgcctcagcctcccaaagtgctgggattacaggtgtgagccactgtgccccggcctcagcttatgatttttggcgttatgatggttcaaaagcaacacacaattcagtagaaactgtgctttgagtacaaccattctgtttttcattttcagtacagtatttggtaaattacatgagctattcaaaactttcttataaaataggctttgtgttagataattttgtccaactgtaggctaacttaagtgttcgagcacgcttaagataggcttggctaagctatgatgttcagtaggtcaggtgtattaaatgcattttctacttaacgattgttcatctgatggtttatctggacatggccccatggtaagtcgagcagcatctgtgctttagcaattgggaaaacagaaaggagcatggcagctcacacctgtaattccagcaatttgggaagttgaggtgggaggattgcttgagcccaggagtttgagaccagtttgggcaaaatggtgggacacccccaactctacagaaaattttttttacaaaggctctactctacctgacaaaatcttattccttagtatttaatttctcttcttagggagaatttaaatttaattaagtaatttaaattaaaattttttcctggcaggggtggataatgaaaaaaaggttgagaaacactggcctagtgcaagaacatggcctttgggagtcacacaggcttggtatgaatcctggctccactacttggacacagtgcttaacctctctaagcttcactttcatcatttaaatgcccacagtattagcataataaccttagagttattggaaaaattaaatgcaatgacgtgcctgttatattgataaatactaattttctttcccctttatccccgctttcaagaatagagattattatagttaaggaactccagtaaactgggtagagaccaaatcaagtgggaatatggcaggcttaagcttgttggaagaaaaagaaaacaggacaagggggctgattaaatatacggagatgagtgtaaagaaataagggaggctgcttgcagtggctcacgcctgtaatcccagcactttgggaggccgaggctggcggatcacctgaggtctggagttcgagaccagcctggacaacatggcgaaaccccgtctctactaaaaattcaaaaattagccgggcgtggtggcgcacgcctgttaatcccagctacttgagaggctgaagcaggagaattgcttgaacacgggagacggaggttgcagtgagccgagatcgcgccactgcactccagcctggacgacagtgtgagactccatctcgaaaaataaaaaagaaaaagaaaagaaataggggagagcccaaggtaattcttaagggatttgacactcaaggcaaagccaccactaaatgttcttagtggacagtggacaatgacatctgaggaagattattctggagcctgacatattacactggaacagaggccggagaaaggagcccacattaattgtggtggacttggaatctgaagatctgagtgtataaaatgttgaacaatgaaaaggttggggaaattaattatggtgcctttaattttgaaacatcatgcaatcagtacaattgttttggaaggatatttggtggcacgggaaaacagaataaaatgtaagcatactacaaaacaatacaaagccatttttgtcaaacgcctatctaggtaggaaatagattatctctggggtgggatcttttctttttcatagttttctgcatttttcaattttcctacaaaaagctcgtgttgcttttataagaaaaaagttattttctgaaagaacctctggcggaactcagatttccagggacccacatgccagcactatcccagcctcgggtgtctgaggtacctagaccagagggtgtggccctggaggtgtgagacagggaaagctgggctgggccggccgcccctgcccggggcaagagcagcgtcgggaccggaggaccagtcgggggatggggccgcagaggtggccgcgcgccgggaagtgctcaggccagaccctccccactcgttacacgccctgtgctgggcacggggaggagcaggacgccaccctctggaaccacccagatcgctggggcctccgagaacccggagggcggaaggcctgagggccccctgcagccgcctactcctcaccccagccctaaagtagccggcggggaactgcgccagcccgcgcgcccgccgagccttcggtgactgacgggaggtgggaatgtgggcggagcctcacgccggagctgtgattggaacaaccaacacctcccaatctctcccaagagagggagacagcaccagagagggatgcgcagaggcgggggcttagaggcctctacgtgattggctaacagcgcagggagccgggcgctgtcccgatgattggcaggcgctagacagccctcggaaaccgccttggcttcgcccattggcatcctgtgagagtaggcgggattggttcatcgtgtggtgctgatgattagctggccgctgagagttagggtgttgggagagagttggagggggacggcgggggctgccgacttccttcttgttattggctggtgaggtgggtgggggtggtgcgacggcccagcggctgcctgggattggtgggggccggcgtgagtgacagacaggggggcgagctgcgcgaccagcggtttgtttttcggagcgttcctgaggtggagaacggtggccggacggagagactgcgggtctgagggactggcgggcgggcgggccgagcggcgccgccgaggccgggctgggccgagcccaggagcgcccgggatgtagcgggccaccctgccgatgccacagcgcccggccgcgggcggagccggagccggagcctggggaggcggcgggggcccagagcgcagcccgcgccccccgcgcggagccaggcccgctgccgtccccgccgcccgggcccccggcatgcagccccggctgcggaggtgacactcacggaccttagccaccgccgccgccatcgccaccatgggtaagtgtcgccaccgccccggcctgtgcccgcgctgcttcgcgacgccccgccccaggctgagggaggaggaccctgggccaccgcctgacaggcatggacagcccgcccggcccggggctgcggaccgccggccggccggccgcccgccccgctcgcgcgccgcggcccgggcgggggttctggctccgcggggcggcccggccggcagagcccgctcggcagccctccttctgggcggcgcggcgggcgcatcccggggaagcggcggcgggaccgagggcccgtgctccgcggggcagcctggtccgaacgagccggaccgcgagcccgagggcgggggagcaagagcgcagtgtggggcccgggctggaggctgccgcaggcccagctgctgttgtgtcttttccttgatttgcttttttttcctgcctgtgtcatttccttccctttgctcacacaggccggcctgtgagagttcccggggcttgctctccagccctgtgcgcgccccagcgcaggggggagggcgtgcggggctcggctaggaggcgattaaactggagctgtgatcaagcgcgcggttgacaaatgcgtgctgcacgcagattgctgggggtcaggagttggtcggatgctgccagttagaattcacatcctactttttgaaaaatcccgttgcaggggtttaatccattatttttttcttgcggtatccctgaaattatgtaacttttgaaagaaacatttgctacacaaaagaatttctctgaaatcacttcctttttgtcagtatttacaatttctactgtgaagatgtaatctaaggaaagcttttaatgtcttccgcacgtagcatttgagttgaattatattccatatcctttttggtagtttagcaaatgactactggactagactaagaaataacattttaaacgttctttacttctcctgcccagacaggtgttgtgatactgttgtcacaagttttgcaaaatatttggtattgccctaaataataataaaagggtaaacttcagtgagaggatcgtttgcaaaacgttccgttgcttctgtgaagtgccccatgtgaagagggagccttaatgtttgccttgccctatagcaaggtcaagtcctttttgtaggaggttaactgtacgctatgtcaaattcgccagatattgttttgtgacccatctctacaccctggctttgaatgaattgccttgttctagttcatgctgtccctcatacagtatgagaagggtttgttcatttgctgggcttactgtttccttctcatgctttccttcagaagtgcgtgctcttctgagggaaggtctgctgtgagagtggacataaaaggaacccagtaaggcctggtatttaaatatataattgaagaaatgtttattgaatttttttatagatgagacacagaattcttgtctaccccaggattcaaacatttatcttgtattatagattttgaataaatcttcgaattgatttatgagcctgtattgtgatagtctttcttacaagtcttttttcttgtcctgtgggggcagctgttagtcccaaaggagagtgtgaaatacttaagggtatgtagaccatccacttcctactttgttgactgctacaccagttagagtgcccacatgtgttgactacatctcattatctaacatgaaaatagatatgaacctgttttcacatttcaagacattttcaaaaagtttataagtgtgtgagtatatggagaccaatgatggggaggaaggaaactatataggctgggtctagagccccaaagaaaaaagggccaggacctcaggatcttctcatttgtccccacatcagttgtcctcctgtcagttttacgtgaagacacatgtaaaaggaacatgcaagaggaattaacttccctggtggctgcagtatattaggcaagctagtttaagaaccactgccctagctttcttcactttcccccatacaattctctccatcttttttgtgaggggaaagtagatgaccttgatacactgttagagctaatattgaattcttcttgacacctggctgttcaatttgctttgtatagagctcattgaggatatgtatacacagatacattcacacacagtctctctcttaaatactagtttccattttggtgatgaaaatttgaatttccagtttagttagtttgcttttagttgctgtagttctaaataaactcaaaggattgataagagagaaacatagacttcttagtattttagttatacttgttaaactccagcctcatgaagaaaggactaaaacttgagtctctgccctgcaggttctttggttaagtaacagtcacattttcctgagctgttctaagcccaagactgaagcctgtttgacaacttgggttaataaaaacatgtcagattttatattgtctgttagccccaatgaatttctagtggaaattatttatctctgtaaataataggaaatttttttttttgctttgatactatgtggctataaaaaattgggattgactggttgttttttcttggtcactccagaattcatttccagatttagtaatcatagtggcaaatgctgttcataatacctgagattgtttatgtggtctttttataaacgcagtctgaaactttatatatcactgaaaaatatgtaacaacttggaaatgctacaggaaactatagtgaatggagtacaggattacagatgatctggttctggtttgaagtcagaattattgtgacttacagacaccttgtctagggttccaaggctgttaggagctccctgttagaatagtctcaattcagtttggctagaatctgaccacctatgtagactctgaatagttagcagctgttttgattgaaatttgaatcacagtttaataaatcaacatggctatgtcattactagatttctgatatttttaaaaatgacagttggattttaaaactgaattttaggttgggcatggtggcttacacctataatcccagcactttgggaagctgagactggtagatcgcttgagcccaggagttcgagagcagcctgggcaacatggtgaaaccctgtctctactaaaaacacacaaacttagctgggcgtagtggcatgcccctatagtcccagttacccaggagaccgaggtgggaagatcatctgagcctgggaggttgaggctgcagtgaaccatgatcgtgtcactgcactccagcccaggcaacaagagtgagagaccctgtctctaaaacaaaaaacaaacaaaaaatagctgaattttaggcatctgtaaaaagtaagtatctgtccaactgagcattacttaggggaatacacagaggataagatgaggtttttctggttctatggaagctgttaatttattctttgcccatttgttgaatgcctcctatgtgccaggcatagtattaagccctgtgcctgtgttatcctgtcctcaagaagttacagttaggtaaggtgaagcagaaacatgtaaacaattaagtgcaaaagtgtgtaaagatatacaggagagagatcaattctgtcgttttggtattgacacatgtaattctatagtctccagtcctttgggttaatttcactaaacgttaaaatgtagtggtgatatatattgattcttatgaggaataaatggcctactttataatatgtgttttaagaatttgaaccatcaattaatattgaatgcctattatatcttagaacagaaaaacgccagcatttgactttgagatttagcaaaggttcaaccatttcttgaaggataaaagtttcttatgaattgagggtctggccttattgcatatactcattgtaaaatgatgtttgcctgggcatggacagggtggaggcagtggaagtatgtggaatgtcatgaagagaaagtaaaatctgactcagggacactgaagcacagactctcctgagtgggcagtgcgatcagacgatctggtggagctgggtagaacattgtcaagatgaagaaataacatcattagttaaatgaaacaaaacaaagattaaaacattactttggggattgtatctatggaaaagagagagagtgtgtggcatagtaaacagacaccatacgggataacaatgtttattagagaatgtggtgcttctggcaacttttctgggttgttagccaagggaactcacaaatgggaagtgccttaagaccctgctttgagatacaagtaatagctcagtctggaagagtggcttcctgctggagctaaagagaggagtatgttgcctggcagcctccataccacaggttggggtaccaggagaagaaaaactacatgccactggggaattacttaaaactgcctaagagcttctactttttaagcctgaactctaatccttgtttgatagatccttttctagttccatgaatactcctccttttcctagattcttaacctcttaatctctaaaattaacctctttctccttatgcttcttcctggtagcttctaagtgtgtcagaccactcccactctcaggaaatcttttcaaagttataagcacactattacgctacctcaacttgttcacgtgtaaagttcacaaatactttttttttttttttggggtggagttttgccctgtcacctaggcttgagtgcagtggcacgatctcagttcactgcaacctctgcctcccgggttcaagcaattctcctacctcagcctcccgagtagctgggattacaggcaccggccaccatgcctggctaattttgtatttttagtagagacagggtttcaccatgttggccaggctagtcttgaactcctgactgcagctgatccaccctcctcggcctcccaaagtgctaggattacaggcatgagccatcgtgcctggccatgactaattttttgtattttttgtagagatggggttttgccatgttgcccaagctggtctcaaactcctgggatcaagtgatatgcccgccttggcttcccagaatgttggacttacaggtgtgagccaatgcgcccggcctgtcactcttattttcttcaatcctttttttttttttctgagacagagtctctactctgtcgcccaggctggaatgtgttggcatagtcttggctcactgcaacctctgcctcccaggttcaagctattcccatgcctcagcctccacagtagttgggattacaggtgtgcaccaccacgcccagctaatttttgtatttttagtagtgatgaggtttcaccatgttgaccaggctggtcttgaactcctgacctcaggtgatctgcctgcctcggcctcccaaagtgctgagattacaggtgtgagccaccacgcccagccagcttgcttttcttaaagaatctttagtctgttaacaattatgtaaaatcatccatataacctcttatataaccatataagctactcatatttaaaaatatttatttttatacatttgtatttatatactctggtttatatattgtctaattctgtctttttttttttttttgagacggagtttcgctcttgttgcccaggctggagtgcaatggcaccatcttggctcaccgcaacctccgcctcccagcttgaagcagttctcctgcctcagcctcccgtgtagatgggattacaggcatgtgccaccacgcccagctaattttgtagttttagtagagacggggtttctccatgttggtcaggctgttctcgaacccctaacctcaggtgatccacctgccttagcctcccaaagtgctgggattacaggcgtgagcccctgggccctgccaattctatcttttttttcatacaactttgtatttgtgtgttgtttatctttttatccctagagtttgaacaccttgaaatatcttttaaaactttctaatgtgtaatacaagataagtattcagtaaattgttgttaatgatttataaaagttcagtaataaaattaagtattagggtagattaaatggcctccagtctttttccattgaccttttctcattgatgataataatagccagcatttttttagcattactgtgttaggtaccataagaaataattcgtaggttttctgttgcttttaactcccacagcagctttgtgaaatgatgctttatctccattttacagatgaggaaattgaggtttggagagaataaatgatttgctcagggcctccttaccaaatttttctgactctgaagttcatattcctaactgcttcagtctaagaaagttgttatttgttgtttttttttttgagatggagtctcgccctgtcgccatgctggagttcagtagcgctatctcagctcacaccaacctccgcctcctgtgttcaggcaattctcctgcctcagcctcccaagtagctgggattacaggcgcacaccaccacgcgcagttaatttttttgtatttttagtagagacggggtttcaccatgttggccaggctggtttcgaactcctgacctcaagtgatccacgcatcttggcctcccaaagtgctagaattacaggcgtgagcctctgcgcccagcctgttatttgtttttaaaagttttgtttgtttttaaagaatgccacattggaggagtgctgataattcagttagtctcagtccataccacagagataactggcttgtggcagccaagtgtgcatagtgatgttgctttttagaaggaaaaaaaacaaaaacaaaacctcaatccaggaagaaatgcctaaaagagccacttgatttacttcctgtctttatacatgtcctctgaagtatcagttgaagaacctgtctacctctaggaatgtattttactttgacacaaaattagattctataaccctgattcacttgtgtcagttgtcccagatttcagatgacagtgccaaacttttccactagtgtgttctcagctctggaactactaaacaagtttgttcattaagtaatgccaggaattggttagcttcctggaaacagaatttgtcaacctgataaaccagctcttataatagcgtcatcttatacagaattagaaatgatttcttcagtcatacttgtggatctgacttgaaaagtggtgtgtgtatgtgtgtgcctgtatgtgtattcacatccatctttgttcaatatctgagttgaaagaactgaaaattctcaatacttagggtggttaatgttgttactgataactccttgcattccgcttttaggagtattgttggatgctcctcagaaaacacttaaacctagtcataatcctccttgtattgatcccaatttattattacagttggcccaattttatatatatttaataatatctaagccatttaatatataaacctatacatattatatataagccaatcttcctagcttagatgttatgctctagtttttaaagtttggttgtgaggataaaaatcaaaacaaaaaaccaagttccctttttgtttttgggacagggtctcactgtcgcccaggctgaagtacagtggcatgatcatggctcactgcagcctcaacctcctgggctcaagtgatccttccacctaagcctctcaagtagctgagcctacagcgtgcaccaccatgcccagctaattttttgtattttttgtagaatgtagttttgccatgttgcccagtctggtctcgaactcctgggctcaagcaatccacctgcctcagcctcccaaagtgctgggattacaggcatgagccaccctgtccagccaggttcccttctttaaagaagctatagggaaattgtagaaggtataaaataattgatgggatatatatgtgttaatttgacagatgtctttttgtagatacccactttctcctcattcattatcccctttactgcatgctttctatattacagctatgtcactctcatacatacttttgtatatgttttgaagtggaatcatatgggaagttatgctcctggtggttttcctgcaagttttaaatctaattttactttcctgaacaagcaaaaacctctttataggcaactttgtccttttctgtacctcgtcagagggcatatagggcaccagagcagatttcgtctaggaagaggggagaggcaaataaggtgaggggccaggcacggtggcttatgtctgtaatcccagcattttgggaggctaaggagggaggatcgcttgagctcaggtgtttgaaatcagcctgggcaacatggtgaaaccctcgctcaataaaaaatacaaaaattagcagggcatggtggtgtgcacctgtagtcccagctactctggaggctgaggtggaggattgtttgagcctgggggtggaggaggctgcagtgagctgtgattgcaccactgcactctagcctgggcaacagagtgaaaccctgtttcagtcagtcagtcaatcagttaatcagtagtgggagaagagacttgagcagttttacttcctacatttcatgctgttcgtttctttccacagggtattagaatatttccaagggacagtgataaagggtagaagataggcactctctttgggtggaatcttttgtatttgcttcttttaaggtgtgccccaagtccccaaatggctcagttgtcaccaaagcaagtgtaacaactcatccctcatgttcccttcacgatcaacagatttattcattttcaatctccaaatgctatttgaatgggcaaagatctcttaaaggacctgggaaaaatttgtacaacatggaattggactggtttgtgttctgggttttggccagttgttttcaatgtatgagaactctagtactccatgctatttcaagaaaaggggattaaaagtaatgccagtaaggtggagacaatgcattgcttggtcagcttagggaggaaaaacaatagaactaccctttgacttccccatgggaagtagtaggcctataaacttgtaaagagttgtgggggttgctggtggtggcggcattcaaatgctaggcttgtaaaacaacttctgttcaaagcagttacctgaggcccttatttggtaccttttaaagtgtgctctcctccttatgatgctttaagaataagtctgggactgacactgtgccataatcctctctctatggattcatcttttcattcagtaccatattacattgtactgtgttcttcacttcaatttttcatctatttttcctggttaagtttctctggcactggaccaactgccctgtttgagcgtgtcccttccctgcaatgaattggtaaatattgctgcaggaaatctgattggagggctattaagaaaccattaaaggccaggcatggtggcccacacctgtatgtaatcttagcactttgggaggccgaggcaggaggatcactggagtccaggagttggagaccagcctgggcaacatggggagaccccgtctctacaaaaaataaaaaaatcatccaggcatggtggtgcatgcctgtgttcccagctactcaggaggctgatgtgggaaggtcacttgagccccagagttggaggctgcagtgagctatgatcacgccactgcactccagcctgagtgacagagcaagaccttgtctcgaagaaaaaaaagaatccattaaaattcaaattgccatagtctgaccttttgggctgcatctgattatagttacagggtctgtcattttacctgggcagaactccctgagtattagttatacagtttgtgaaagagctttgctggtctgtatttaagtgtcttagtccatgtgctctctttcattgcagacgaacaggaggcattgaactcaatcatgaacgatctggtggccctccagatgaaccgacgtcaccggatgcctggatatgagaccatgaagaacaaagacacaggtcactcaaataggcaggtgtgtgtgaccctggcagagctaagtgagatttgttggggaggggttttcaaatgggaaatatacgaaaagccaaggagactacattaccagggttgaatgcttttgaccccttcctttcacagtctgttaaatgggaagtaatacataccaaccaggtatggttaaatggtaagtgatattgggaggccgaggcaggcggatcacctgaagtcagtagtttgagaccagcctggccaacatggtgaaaccctgtccctactaaaaaacacaaaattagccaggtgtggtggtccatgcctgtagtcccagctactcaggaagctgagacaggagaatcgcttgaacctggaaggcaaaggctgcagtgagccgagatagcaccactgcactccagcctgggcaagacagagtgaaactctgtctcaaaaaaaaaaaaaaagttatatatgccatgcagttatggatctatgatttggagtcttaaagccttgtgtaagcatttcatctgttatggggacagtattcatattcgtttttcccctttactgatatttggcaaatatttaattcagattcatgatccctaagtcagaaggtttttagctaccttacagtatatagtcaggaaaaactaattaatttggtattagcttatgtaaaatataattaagaaggtaaatttattaattaaaatgtcacctagtatattctgaaggcaataatgagtgattttgttattactgtttacagttattttaccttattaaccttattgatagtgcctgttttattgagagttgtatgcttctttaggaaaacattgcctattttccttaacatttaaacttgtgtgtcattgacaatcttcttctcacctgtagtgccacttacctgtttcctgggtactttgttctgcagagaggagtgaatgatggggagctttcctacctagtgggtatccagtgctgtgtcagctagctatattgggcatgtttgatgaaaatttgtgtatgacattctcccttttggttctgtttgttatcagctaacctcctttcttctcatttgcaccttgtttaccaattcttcagaattggttcctagagatagtataaggccctaaaacttttcctgtctgtggtctgctagatagagccttccagagtatttcctgcctttaggaatcctagggaccccaagggaagaggagtccttttgtttcatgttaaaacagaaggattagtttaaaaagctgcttttgttgttgttaccttatagtactggaggtataaacagataagggcccattcttacactattttcatatgttattcagtctgactgtgtgagttctcccttgctataactcatttgtattcaaagccacttttcgaaggagcattttaccagaagtgagtcccctcccccttgcttgagcctaatgacctcactttccttcctgtcttcctatgtagtgtgtgcttgctaacattgctccagttagctgatctttctccagactggactattagcatgaatatcagttagtgggtgaaaaggggaagctttcttgaattggaaggcccaaaaggacgaggctgggaaaaggaggggcggaatggtcactgatggttccttgaaggaggattcctttttaggactccttctgcttagagcctaaaagccatgatgagggaagtcttgatcttttgctgtgcctgctgctgcgctggtagagtgaagtcagtggttatgaaggcagaagcctaaaaaggattgactgttaggaagtaatcttaacaagaggtactagatctttggatccatgatttacttcaatgttgtcaaacttatgttgcacgaaggatacaaattattaacctcagtttttttgtttttaaagaaaaaacacaacagcagcagctcagcccttctgaacagccccacagtaacaacaagctcatgtgcaggggccagtgagaaaaagaaatttttggtaaggatccagattacctgttaaagccaaaatgtacttttaaatctgctactcatgctgcaacagcagaattcacttcccagacaagttgttttagtggatttgtaaaaagcattggttacccgtgacctgtgttcagtgcttctagtcaccatttctcacaacagtattattcataaacagcctctatcagtgctgtccaataaaccttctgtgatgacagaaatgttttatatctctgctgtccaatgtggttttgtagccactagctacatgtggctgttgagcaactaaggaactaaattttaaattttatatcattttaattaatttagacagccacatgtggctagtggctattgtattggacagcatgactttatgcactatgtaagggactgttgatttattgggcaagaaattatgtatatgcttggagatgtgtagatattcattggtatgttcattccttacacacgtcatgagtttctgtacattgtgataagctaataatgggaatcctacctaagatttctgttttaggaagaatgtgaagatgtggaactagaacagctgtttagaaattgaagctcaaagttttatgttaatatgggcaaaaggggaaataaaatgctaagatagcttttcctcttaatgaagtcaaggttatagaatggcctgtcctgggaagtgtagcagatgttttgcttctgaccaagagggatattcttcagcaaaattctgaaagcagaaaaagacaaagtctcagcaaatgcatttctaggaaagatagggtaagaggtagtgcggggaagatgttggggagaggtatttatagcctagtataatgaaaggagcctggtgatattaataatcatttaacatcggattttataattcacagagttacacatttattattattattgtagtttttgttagcctaggcctgagatagaatgaaacagttttcttcattaccagttcttctgccagaaagtccatgcttaggaagagagaggaatgaaagatcaaaacctaatttaaatggtgaagagttgccaaatttggttaagaaatgtctaattggattacagattcaaattacagagtcccagttgaaagaagctaagcattttggctagctggaaaggttgtttattcaagggtggaatggggctggcagaggcaaacagcctttcactatgagaatggcagtgctggctacaaggcagagtcgagactggcacagcttcatggagctcaagcttggcccagcaaggaaagccagaggagctgtgggttcattaacaggattgtttgggtgccgaggcctggaagaactgaaaaatctaatttaatatctctgcttagcaagacttgagacatccttttccctaagtaaacaagcttggtaagtaattgaaaaagagaatggatttgagaacaaataggcagctatggaagtacatgggcagtgagctattaacaattttctaggaggtagattctgtattctctgtattctaggagtacagagaatactgtacactaggagcatttgctgtattctcccttttgtatattgggtctctggaagcctacagcgtggttagagctgactgaatattcttagatgtgtggcacatcctacgtgtggctgggtcctatggatagttttgcaggccatgatgtgcagtgtccctttagcagtcattaactcacagtgagttatcaatgggtgttagttctctgtgggtctgacaacttagtatagtgaaaagagtgctggcctgtggctgaacatgctggagaagagcttgcctggccacagggacacagccacgcagatccagcatgtgtctcccatgtgccaagtggagcccccagccaagaaggcagccacactagcagagggtgacaaggacaatgacattgacctgtttgtcagcgacaatgaggaggaagacaaggaggcagcccggctgtgggagaagtggctgaggtggtatgtggagaagaaggccaagaagactgcgttggtggtcaagtcctccatcccgctggacatcaagccttgggacaatgagaccaatatagcccaattggaggcctgtatgcgcttcatccagctggacgggctggtctaggggggcctccaagctggtgcccatgggctacggtatccggaagctgcagattcagtgtgtggtgggggacgacaaggtggggacaaactttctggaagaggagattaccaagtttgagagcgtgtgtagagtgtcgatgttgcagctttcaacaaggtctgaagccttagagtgtgtgtgcgtgcatgcgcacgtgtgcaagtgtgtgaggccctgccactattaaaaactgagaccaaccaaaaaaaaaaaaaaaaaaagagtactggcctaggagtcatagagttgttactcatctattaatgtaggattttataatttatagagtgctttcaacaacagttaacatcaatgctataagcatgtgtataaggtttacacagcttttacacaaaggtattgagtagaggcaggaagtaaatccaagccttctgattcctagtcaccgtaattttaccatgtataagtcatataacctttctgaagtgagtttttccatctgaaatatagacttaatactcactgtgtctacctcttaagattgttgtaagatcatagacagaatgtgaaatattttgtacattgtaaaacaaatgtacaaatgtgaagttgcagtggttatgtcacttcttatgttctggcactgcaggtgtgagctttggggaaagcttctaactacaactgtccatagtgttgtggaactgaaaggattaaggtttttctctctttatgggattatcattactgtttatctgatgatctttgcaaatttctgaagctagcctaatttctgaaaatcccagtggaggaagaaatggaatccttatttccatggattcctgtttcccttgaatcttatcaaaatggtaggtagatacttgaacagagtctgggctctggatctaaccctccagatgttcatgagtgggtgcttcagaacagaaaagctgctttcttcatgataggcacaagcagggcagggccttggctatcatttctagaggaagagaattccaggatctgttcccccagcagggtcagtgattgagcagactgtcttttgctttcagtgtgaaagacctggctcttcaggacctcccttctctttcaagggttgttgataagatgggctggccagtttgaaaataagatataaaacaacacacaagcctggcattatattttgtaagaagattgctttataatcgtctcttccactgatctcctacaactttccagagtcatgcttaaaaataaaattttaatttttgttgtatttttttttcctttcattcacttactctctttggcaaaataaggactgcaattccagaaatgtggggaggcatcaaaggtatgtagcaaatgcagggagagaaatcagtacagaatcagagcgaggataagaagaatgatgggtaactgaggcctttttcaggtcaagttagttcataaacctttggttaataaatcctgatttttctggattcttgaaagctttttgggctacatgttcagctgttgagtccagactttgagaaggtcatttctgctttagtgttattgtcagttattcctgttgctcctgctgagtccctgaatctgtagctcaacccgacagcccgcactgtctctctcctgagcgtggctgtcactactgctctcaccggattgcctgtggtggggaggggacatgaagctgcttagacctgaatttctgtactagaacttttttctcagtagctgacacctccattcagtttaacatgtgcctatggtcacgcttctcagacacacaaaagaaatgtatgtcggtcaggagtggtggctcatgcctgtaaccccaacactttgggaggccgaggcaggcggatcacctggcctggccaacgtggtgaaaccctgtctgtacaaaaatacaaaaattagctgggcatgatgataggtgcttgtaatcccagctacttgggaggctgaggtgggagaatcgcttgtacttgggaggcggaggttgtagtgagccgagatcactgcactccagcctgggcgacagagcaagactccatctcagaaaaaaaagaaaaaagaaaggtatgtcatattccctgtaccccaggaatcatgcagtcttactgggaagtgaggactacatgaaaaaaagaaagtatgatatgactatgcctcactgtgtggtacagagagtaagtgctatagaaggccaggaaaatgaaagatgagcctgggccagaggagctatggagtcatttcaggtggaagggcacttgaactaggctgtgaaggaagtataaacagttaggtagaacggaggaagggtggcactccaggtcaggaaacagaatgattaaaggcctaggggaagaagcaaacatggcttgtatcaggaaacaaggtgagctttgatctggctttaaaggggggtccctgtggggaacaaacagtgtgagatgatcaggtaaactgaatgagcctaaatcccagagggctttgagtgatagcagagaatttagactttattccatagataatgggtatcactgattaccttatgaacaaagaaggaacatggtgaaaaaggtgattgagatggttggaactgtagaggaacgcagagtgggttggaaatggggagctgaaatgtatcctcactctgattctgtactgatttctctccctgcatttgctacatacctttgatgcctccccacatttctggaattgcagtccttattttgccaaagagagtaagtgaatgaaaggaaaaaaaaatacaacaaaaattaaaattttatttttaagcatgactctggaaagttgtaggagatcagtggaagagatgattataaagcaaccttcttacaaaatataatgccaggcttgtgtgttgctttatatcttattttcagctttatacatttataaatgtataaagatataatgctttatatcttattgactctgggatcaaggggaaagggtctcactgaaggtgatgtcagggagaatgggaagcagagtcttataccggaggtctttgagaggagaattgaaatttgctccctggctgtgaggaggaaaaggaaggaaagaatcaagcattactcagagatgtaactgtgtagctgggagcacagcagtaccaatgttagaaatagtgacactgagccaggcatggtgacatgcgcctgtagtccaagctgcttgggaggctgaggcaggaggatcacttgaacccaggagctcaaatctgtagcgcacagtgattgtgcctgtgaatagctactgcactccagcctgggcaacatagcgagaccccatctctgaaaagaaagtaatagttgagaagggagactagtttaggagagtagttgatatagacacatatggctagattgagtttgagattacagtgggaaaaaacctcaagagtgtgtgaggtatgtgtatgtgtgtacgttgatttttgcaggtccataatctgttatctgcagttctgagatccaaacagtactacaaactaaaggggtatttttagtttttagtttctatttattattttttaatttgtagcagactcatttggcaaccagacctgtcctgaatagacacagggcaatttatggtctttctttattctacttattgtgaatattcatacttttcattgcaaaaattaggatagcttcgataaaaagcatgtactctgttaacaaatagactccaaatctcagtgatttaacacagtattcccagtacaaggagggggagaacagtgttgcccagagttacttaggaacctggattgagggagactcctctgtcctaggacatgtgcctgccagggaagagagtatagaacttgattctgttcctagctcttggtcagaactagggacaaaccccccaaactaacttttaagaggtccaggaaatacttgagcattctgcctctaccacagtagtactgtctcagacaccccccactccactgcctggggaggcatcacatgatttatagaacatctaccatactacccctctaaatccaaaacatgcattctgaaacacttttggccccaagaattttggctaaaggataatagacctgtattaccatttaccaaccacttgtatatcaggtactgttctaatcactttacccaattatatgatttaattcttttgataattccgtaaattggatactatcattctcactttacagatgaggaaactaagttataggttaagtatgaggctgcagtgccattactttttttttttttttcctgagatggagtcttgttctgtcacccaggctggagtgcagtggcgtgatctcggcttgctgcaacctccacttcctgggttcaagcaattctcctgcctcagcctcccgaatagctgggattacaggtgcccgccaccacacccggctaatttttgtatgtttagtagagacggggtttcaccatgttggccaggctggtctcgaactcctgacctcgtgatctgccctccttgacctcccaaagtgctgggattacaaggccaccacgcccagcctagtgcagttaggtttaatggcaaaaactgcaattacttttgcaccaacctaagttcgaggttacacagctaggaagttgtagagccaagatttgaagcaggcagttggactccagtgctacattcttaacaactacatattggcctcagatacgtggcaagcagatgagccttgcttcagtgattggggctacatatagagattgaggaatcatctatttagaggcccactgagaagttgtatgcagagcaggagaaagccagaagtcagaagtcgcaaggttgaggaatggtcatgtgtttggggaggggtgggagagggcatgaacaagaggaaccagcaaagaagcagaagtggtcagagtggtagcaggttccctgtgctgggatagagtcacagaagttggaaatagagttggccacccaccagtgtgaaatgcctcagagaggacaagaagaatggctggccggaaggcattgaatcaaattatctttatctgaacttcccttatctatggcttattatggtcaacctgatgggtgaaattcagatttagggactcagaagatttgggcatatcatgtggttcatggaagcttgtaaggctgtcatggcatcaaagaagcatctttgtttacactgctttttagtcacaggcttggttagtcttaagtagcagtgatttgtggtttggaacaaaagtttaattccctttctgaataaattcatgtagagcagtgcttaggttatggctcgttatgaaataaatttagttccttcatttccataaaggcactgaggagattccttcattagtatatctaaatataatgttgtcccagggctggggcagtggctcacacctgtagtccaagcactttgggaggccaaggcgggtggatcacttgaggtcaagagttcaagaccaacctggccaggggtgaaaccttgtctctactaaaaatacaaaaatcattcaggcatggtggtgcatgcctgtaatcccagctacttgggaggctgaggcaggagaatcacttgaacccaggagacagaggctgcagtgagccgagatcgcgccactgcactccagcctgggcaacagagtgagactctgtctcaaaaaataaaaaaataaataaaatgttgtcccagtttaagaatgaaagctgttatgtgtgtgtgtgtttttaacctcgtttttttgttttgttttgttttgtttcaatatatttttgagacagaatccttgttctatcacccaggctggagtccagtggcgtgatcatggctcactgcaacctcaagccccccgggctcaagcaatcctcttgcctcagctttccaagtagctaagactacaggcgtgtgccaccacaaccagctaatttttgtattttttgtagagatggcgttttgccatgtcgcccagactgatctcaaactcctgggctcaagcaatcctcaaacctcggcttcccaaagtgttggggttagaagcgtgagctaccacacctggcctaaaacttctaaaaatgaaaaaaaaaaaaaattaaacaaaaacaaaaacctgaggaaatatgtgagtaaactatggactttagttgatatatcaatattgattaattaattgtaacaaaaagaaatataccatactaatgtaagatattaataataggggaaactggctgggtgtggtggctcatgcctgtaatcccagcactttgggaggctgaggtggacagattgcttgagcccaggagtttgagactagctgggcaacatggcaagaccccatctctacaaaaagttacaaattagcccagtgtggcgacatgtgcctgtttgtagtcccagctacatgggaggctgaggtaggagaatcaatcacctgtgcccgggaagtcaaggctgcagtgagccgtgatcgtaccactgcactccagcttgggtggcaggagtaagaccctgtctcaataataacaataataataataggggaaactgtacaaaggggagaaggatatatcagaactctgctctgtatgctcagtttttctgtaaatgtaaaactcttctaaaaataaaatttattaattaaaataatagagctacagcaaggtatgctgggctgtaggcaggaacaggtaaaaggatgtataaccctcccacaggggcagacaggactacaaacttcatagagcacttgggatactccagatccagttgaggaaatagtgtgggaagctggagaccacacatcagagcatggcaactctgctttagaggactcttgtcatggtaactgtttagaatttcaggggaacgagaaaaagaagatagtgaaaaactgctctcagtgcctgtgtgacacttaagttgtagcatagcatggtagttaagagtcaggcttccagggttcaaatcctacctcttcctttacaagcgatatgacctgaccttgggggaacttacttaatcttattgtaactcagttattttctgtaaaatagggataataatggtacttgttttgaggatcagtttaattaatatatgtaaacatgcttagaacaatgcttggtttgtggtaaatgctcaataaacgttagctattatcattattattaatggataaagtggtccatgtgttatcttacaggataagaaggctatatcagggctgtatattttttgagacagggtctcactctgtcacccagactggagtgcaacagcattgtctcagctcactgcaacctctgcctcctaggttcaagcgattctcctgcctcagcctcccgagtagctgggattacaggtgtgcgccattactcacggcacactttttgtattttaagtagagatgaggtttcaccatgttggccaggctggtctcaaactcctgacctccagtgatctgcccgcctcggcctcccaaggggctgggattacagttgtgagccactgtgcctctggcctttaattgccattttaaatgaataaagtaaattttctcagttttaattttgaatatggtaaataccaatagatataatccacataagcaaaagctctttggggtctttaataatttttacagtgtaaattagaaccactcttgtaattcattgaactggaagagaagtctagtcccttaataccttgggaaaagggagtcctttaggcatctacccttcctttcaaactcactcccttttctgttgtctgtttgctatgtgttcctcatcttcaaatactcttaagtcctctttcttccaagccacagcctattaatttgtcttcttcaaaataatttttcttcatcgactatgacttcattctctcctttatctctattatttgctggtttcctgcccatcttacctttcttttcctctacacctgttcttctgtaatatctctctcctttccctgtcattttttaaactccctcaagttgtttgtttgcccttttgcaatatctcttcctctttaatttgttctttgtcattttaacatttctacttcctcttatttctcatatttatacttctgttcttcaattcattcaaccacttaacaaatattattaagcacaaatattatatgccatttcctttgcctggcactggggatatagaaacatgatagacctcgggaggccgaggcaagagaatcgtttgaacccgggagacggaggttgcggtgagccgatattgtgctactgcactccaacctgggtgacagagtgacactccgtctcaaaaaaaaaaagaaacatgatagacctgatctctgctctcctgcagtttacaggctactcatgatggtcattttggaaaaggctgggaacagtgtataagatcctactttacccccagtggggtagctttgggagggttttgggaaatcaatgatagtggtaccagtggcagcagcagcaaaaaccaaatattgcatgtctattatgtgtcaggtattttacttacatttagttgttgtaagaactctgcaaggtatgtttaggcttactctacagatggaaaaactaagactcacagaggataagtaacttgcctgtggtcatatagctagaaagcatcagcagcaaaatttcttttttgtcttcagtcacatcagccaacaaggaaatgtatcctggtcaggaggtgatagagtgggagaaacttccagagccaattgtagaaatagggtgtgtatgaagctagaaacagcatgtcacagcatagcaactgagctgggcagccacctagggatcttaccctaagagctttgttgtccctgatgttagaactggaagttttaactcattggaaaggaatgcccatgcccatctgggaagagaagctggaccaggagccatcagggatgtatgcctaatgttgctaacgaactgcccaaggcttacttggcaatggcaggagtgacacattccagagaattctctaacctgtctatcattctttttggcagagtgacgtcagaatcaagttcgagcacaacggggagaggcggtaagtctgccttctgatgagtagctgtgttcatgtatgccaaagttctcagatagcattgagttcatggaagtcattcccctgtcctgatccctgtggggccactggctgggtaatagggtggattgggcataaagggaggaaagtttcacccttgtcttggcctactaattgaaccttgttcctatcttagcattggaagccatttcaactgctgatgttttactgttctgctctattctgctgctgtgaggtctgacattttattaggaagtgaggactctggccctactcagagtcatggctttcagacacactgacactgtgtcacctgtgggcattagagggagggcaggattctcctgtgatatggtgccattactattcccagtagagcagccctggctttgtccacatcaagggtcaggttggtgaattagaagtttcttcatgatgtctctaggtcatgggaagctgcaccaagtccatcagttgtaaaagactttagctcctttgaggacatagaaagagggagtttttcggtctgtgttctgaatcttacctcattagggaagtgaaagtagtgttacaaaactcttctgtccttttctccattgtcagtattttcattattgttattttttgtgggaagccaaggtagaagttctcagtagaaaaaatgtgactgtacttaatttctgaagttatttaaggaaaacattcagaaagcatacagaactctggacatgggatatttgggaccttgcatgtttgtgcatgtgcggcacatgtacacataaatgtgcctttcggtgttttttccactctttgcctttctttcccattgatatactaccccctgccaccctcagctttcctttgctttgagcatttggacaggtgaagagcatacccattagtatgaggtcttcctactttaagagtctcaccacaggaccttagtacctctaaacattcttgattctggtagttctctacagttggtacctttcagcctactttgcagctggctccagaggagacctgtggctactattctccctttaaaatacacattcacaagcctacaaggttgtcagaggcaacccggtggaagcattgtggaaagtgtggtctgcagagccagggtccttctgctcctatgtgagttccaggcctggagggaggaaggtctgagctctgtccccagctgctcttcctgtgtcctgccattagcagagaagttaaattgtcacttcactgttgctacttttcacattttccaacctgagttttaaagggatggccaaactcagagcagcagagttttcaatcaaaagcacaattgtgttggagcccaattacgcagttaggctctcctgaattccctgttcccaaagtggtatgcagttacagtgagcaggcttacactgagaaagtgtatgtgtttggtttcagagaagctgccagattgaaaccacaaatatttaaggtggtcaggcaggaatggccttctgaagccctgagcagcagaacgttgcttatcaaggttttgaaaatggtgcattctctttttacggagctgttttcaggagccatggcatttcagtgtttgtgtactatatgtggaattgaggactttataaagttggtgcagggaagccaacagagttagtactctgtgccacacagctctagtttcgtgtatttcacgtcaggattttgtagagaatgtcattatgggcattttaaactttttacctggaatatgggtagtatttatctaaatgtaggcccttatagaattagaattcacaggaaagaggaaagaagtcatgacttttcccacttatccatgacaggtattcattctggtgggctgactttccctttactttgagaatatggggaccagacccctgactgtcctcccttttggccccaggagggctggggagaaggattgtagattaagatctccttccctttggaaatgttaatgacacactgatgggggtggttgcatgggtgttagacctctctttgaagcactggcctaaaaatgcctgttattcaataggatggcagcagcttagatcttacccaatctggaagtcctggcctctgatcttgaccagactttcaagctgcttttgtgggttttgaatggctcattgctaggccaaatgcagaagaatttatctctgatcatgatcctttttcaatagtgtgctagggacatctgagtggacttctggtattttatccagaaaggctggacccttttgcactgttgctgaggccttgaagaaggaggggtatgatttgctattaggcattaatagaaagctatcctctcaaaaggcttcagaaacacctctatctagagaatccatctagatagcacctaacagtatcactgcttgggacagttgatttggaagaaaaaaatataagaattacagtctgggccgggtgtggtggctcacgcctgtaatcccagcactttgggaggctgaggcgggcagataaaaaggtcaggagttcgagaccaatatggtgaaaccccgtctctactaaaaatacaaaaattagccgggcgtggtggccggcgtctgtagtcccagctactcgggaggctaaggcaggagaatcgcttgaacctgggaggtggaagttgcagtgagccgagttcgagccactgcactccagcctgggggacagagcgagactccatcacacacacacagaaaaaagaattacagtctcaatgggtttcctagtggagatgaaactaatttggttagcagtataatttccaaaaatgaaaggtggtgatggacaaaggaaaaaaacaggaaggaattaccttcttgagatgttaggctttgcgtgaaggatagattatggtttatattaatagtctatcaatgttgccctgtagaactttctgctataatggaaatgttctatatctgtgctgtccagtacacatatggctgctgtacatgtggctaatgagcacttgaaatgtggttggtgagacagaggaacctttttcttttaagacagggtctctgggccaggtacagaggctcacgcctgtaatcccagcactttgggaggctgaggcaggaagattacctgaggtcaggagttccagaccagcctggccaacatggtgaaaccctgtctctactaaaaatataaaaattagctgggtgtggtggtgcacacctgtagtcccagctactcgggaggctgaggcaggagaatggcatgaacctgggaggtggagcttgcagtgagccgagatcgtgccacttcagcctaggcgacagagcgagactccatctcaaaaaaaaaaaaaaaaagtagacaggatctctgttgctcaggctggagtacagtggtgtgatcgtggagcctccacctcccaggctcaagcagtcctcctgcctcaacctcccaggtgcctgggacaacaggcacactgccatagccaggtaatttttgtagagacagggtttgccattttgcccaggctggtttcaaactcctggactcaagctatccacctgccttggccttccagagttctgggattataggtgtgagccactgtacctgttcaggaaccaattttcagtttaatcaatttaaatttaaatagtcatatgtggctaatggctgccatattgaatagtgcagatgcagttctagatgatgaaggcttttatgcttctcactgatttgagccaacctgttacagaagaacattaaagaaattatctggtcagattttattaaaacccaatggtttagatccctctctcttgtggcttattgcttcttcctctggttacaccacttcccactctgggggagcagggaagatgagaaagaaccacacacttcttcctctcagcatggaagaggacaagaactgcgcaggcccatggctgaatactgcttgctccaacacacactagtctgattttatcctgcttaggtgtactaagagatgaaggttgttttaataggcatttctccagtcacattgggcatcttttcatgtgttttattagccacttacaattcttctgtgaattgtctaatcttttgccttttctattagattgtcttttattgattttttacaagtattttctcaaagtttgatatttgtttaactttgttgatggcttattttgcaatcagaagtttatttatttatttttttgagacagagtctcttgctctgttgcccaggctggagtgcagtggtgtgatctcagctcactgcaacctctgcctcctgggttcaagtgattctcctgcttcagcctcccaagtagctgggattgcagggcatgtgccaccacacccaggtaatttttaaatttttagtagagatggggttttcccatgttggccaggctagtcttgaactccggacctcaggtgatccacccaccgcagcctcccaaagcgctgggattacaggcatgagccatcttgcctggcttgtcttctgtattttatgttatggttaggaagaccttctctctctctgtctcttatagagagagagagagagagagagagagagagagagagagttttttttttttttagacagggtctcattctgttgcctaggctggagtatagtggcatgatcacagctcactacagccctgatctcctgggctcaagtgatcctcccacctcagcctcccaagtagcttagactataagcatgtactatcacacctggctaattttttaaaaaaatgtttagtaggcaggagggctcactatcttgcccaggctgatcttgagctcctagcctcaagcgagcctcctaccttggcctcccaaagtgcttggcccccaagatttttttttaattctgtattttcttatataaatttgagagtatgtgtgtgtatgagtttctttcttatattcttttcttcagttatctctgattatttttagtcatttctgttctagagtattgggttgaacccatataaaattgccacttttatatatcaaaaatggtcggccatcagtagtctcatatagttcaacctaatacattcattcaaactttttattggccaagcatggtggcttacacctataataccagcactttggaaggccgacgtgggaggattgccagagttcagaggtttgagatcagcctgggcaacttattgaggcccatccctacaaaaaataaaaaattagtcggtgcatgccagtagtcccagctacttgggaagctgaggcaggaggattgcgtgagccccagaggttgaagctgcagtgagccgttatcattgccactgcactccagcctaggtgacagaacgagactctgttttgaaacaaacaaacaaaaaaaccccacaactttttattatggaaatttcaagcacacacaaaagtagacagagtattaaactgaactcccatggacctgtcacccagcttcaacattactaacattttcccagtcttgttttatcaattcccacttttaaattttgctgaagtatttaataacaaatcagattttacacctctttggatgactccttactctaccttatatttgtagaaattgttctttgaactgacctaatgagtctctccagaaaatcttcaatgtcaatactagttacatgcacagatatgtcactggttaagaaaactgatcaggcatatcactaactcaagggggaattcctgtgactctgtagtagaaaatcttaattctgaggaaaatcagtatggagattcttatggcatctcaaagatgaacgatggaaaagacctttcaagtcctagagttgagtcccttaggagttgaggccatgttttcaggactgctactccagtctgtacgttttctaccttatttcctaaataatttttttctttcaacttttatttaagttctggggtacatgtgtaggatgtgcaggtttgttacatagttaaacatgtgccatggtggtttgctgcacagattaatccatcacctatatattaagcccagtatgcattagctattcttcctgatactctctcttccccaagtcccaacagccccagtgtgtattgttccccctccatgtgtctgtgtgttctcatcgttggaacatagtttttaaatctagtggcctcttctgtcattggcagaagagtctaagctgaagtggtagatgaatggttgggattgagcaatagttgtgggtactgttgtcaaacctgatagatgctcagagggtgaaaggtaacggtagagaagaggaaaaaaggaaacaatcgggaaaaggcaaattgagtgaaagaaaacagaatcctatgttgagaagaaaggaagaatatactcagaccattgctttttaaaccctacgttttaagtatacaattaaccaacctttctttctgtttcttttcagaattatagcgttcagccggcctgtgaaatatgaagatgtggagcacaaggtgacaacagtatttggacaacctcttgatctacattacatgaacaatgaggtgagaaggcagatggatggggcagggacaagaggggcagatgcctaccttttttctctctgtttaccagagcctttaaagtttgttcctctaatatcatctgcaggttttcattttctagacccccttttcttaattccaacaactgtgggatctctgttttttactacatgggagattactcagccatctcagccatctccattccccctactcattcagtgcagatagctctaatattccatggtggaatcaggtatggtaccagggctagggcttatactgtctcctttacattttgtaggagtatcttatttttttccccccagcacagccttaacaagaagcagagggtttagcaggggctagggaggtgtgaaaaaccagtgagtaggtcatctattacagtcataaatgcaggattcttctcttagagtttcttctgattggagcttatttgtttcaaatgttagcacctgctccaataagttctttaactcctcctcctcctcactccaccccaacggtccttatttacttctactttgaatatcacccaggaaggaattcttttgaatgtcagtttctgggctgctttcccagctccaagaagaatattacagactacaatcagcttaggctggtgctttgcagtgtatttatgctgagtaaagaatgtgtacctcgaggaaattgagttaggggtgcaagacaagaaagctgggcaacatcatgaccctttgagaaccagatcatcactgtgtagttttattttatttgatgaggagttaaaatttttcttttagtaaagacttttctgaatcatttagtactcttttctttttcagttaatatttccattaagaattcctgatgtttctttattctaaagccaaatataaatcattgttattattttagttcatacatgtcttaacatactctactaatgttaatgatcaggagttgactaacttacatttgattaatttaaaatccctcaattccgttcttttgtttgccctttaaaccctgcactgtcaagatctaagaatcccaaatgaaaaatctactgagattttatttatttatctctttgtaattatagttttattgagattaaaaaatttatcatctaaaagtataccattcagtggtttttagtatgctgatagagttgtgcaaccaacaccgctatctaattccagaacattttctttttttttctgagacagagtcttgctctgtcgcccatgctggagtgcagtggtgcaaacacggctcactgcagccttgacctcctgcgctcaagcgattcccccacctcagccacccaagtagctgggactacaggcacacaccatcacacccagctaatttttttgtattttttatggaggcagggtttcaccatgttgcccaggctggtctcaaattcctgagctcaagcgatctgcctgcctcagcctcccaaagtgctgggattacaggcatgagccaccgcacttggcctccagaacatttttatcactccaaagagaaacctgtacctattagcagttattcccctttctctcctcttctcagctcttggtaagcacttatctttctgtctctttggatttacctattctgaacatttcgtgtagtgcaatcatacagtacgtgaccttttttgtctggcttctttgactaagcgtatgttttcaacggtcatctgtgcatgttgtcagtatgtcattctattttatggctgaataataaatattccatttatggatataccacattttgtgtatctgttcatctattgatagacatttgggttgttttcattttttggtgattaaatagtgctgctatgagcatttgtttacaagtgtttaaatgaacatatgttttcaattctgtaaggtatatacctaggcgtggaattgctgggtcataagataactctaactttttgaggaactgcccagattttctataatggttgcacaattttacagtcccactagcaacttatgagtgtattagtctattctcactctgctgtaaaaaactgcccgagactgggtaatttataaaagaaataggtggctaggtgcagtgactcacgcctgttaatcccagcactttgggaggctgaggcgggcagatcacgaggtcaggagttcgagaccagcctggccaacatggtgaaacgccgtctctgctgctgatataaaaattagctgggcatggtggtgcacacctgtagtcccagctactcaggagcctgaggcagaagaattacttgaacccgagaggcggaggttgcaatgagccgagattgcagctcatttgagacagagttgagactctgtctcaaaaaacgattaaaaaaaattattttattttatttttaaataaacaaataaaggaaagaggtttaattgactcacagttcagcatggctggggaggcctagcaaacttaacaatcatgatggaagggaaagcaaacacatccttcacatggcgacaggagagagaagggccaagcaaatgagaaaaagcctcctataaaaccatcagatctcgtgagaactcactcactatcaggagaacagcagcatgggataaccacccccgtgattcagttacctcccactgggtccctgccacaacacatggggattattggaactacaaatcaatatgggatttggatggggacacagccaaaccatatcagtgagggctgcagtttctccaccatccttaccaacatttgttattttcttcttttaatagccatcctagtaggtgtaaagtgatatgtcactgtgagttttgtttttgtttttggtttgagacagggtttcactttgttgcgcaggccagagtgcagtgtgcaatcatggctcactgcagccttgacatcctgggttcaagtgatccccccacctcagtttccccagtaactgggacaataagcacatgccaccacactgagctaattaaaaataaatttttgtagagatgggggtctcactattttgcccaggctggtcttaaactcctggcctcaagtgagcctcccgccacagcctcctaggattacaggtgtgagccactatccccagcctacttggttttttttatttaactcccttcccaaccattcttatttattcccactttgaatgtcacacaggaagaaattcttttgcaatataatatgatttgcagaacattctcccattccataagtagttttgagattttattttaaatatgtactgtttttggcgaggcgcgatggttcatgcctgtaatgccagcactttgggaggctgaggcaggcagatctcttgagctcaggagttcaagaccagcctggacaacatggtgaaaccccatctctacaaaaagtacaaaaattagtcgggtgtggtgcctcatgcctgtaatcccagctacttgagaggctgaggcaggaggatcactttagcccaggaggcggaggttgctgtgagccgagattgtgccactgcactccagcctgggcaacagagggagatgctgtctcaaaaaaaaaaatcttgtattataaattgggaactgtgtaagttaattggacttttgcttgattttgtgtttaccatacgtgtataaaatctgaccaggcgtggtggctcactcctgtaatcccaccagtttggtaggctgaggtgggcagattacttgaggtcaggagttcaagaccaacctgaccaatatggcaaaacccagtctctactaaaaaaaaaaaaaaattagtggggagtggtggtgtgcacctgtaatcccggctactctggaggctaaggcaggagaatcacttgaacccaggaggtggacattgcagcaagttgtgattgtgccactgcactccagcctgggcgacagagtaagactctgtctccaaaaaataagaagaataagaataagatctgacatttgctaggtcctaagcaaggcatacgtttgcatcttatgaatctcttaataccaagtattcataacatgctctgctttttgcagtgagtgagacttatttgtaccctcagggaccttctatttaatatttcactggaacgtatgagtgtattagtctgttctcacgctgctgtaaaaaactgcccaagactgggtaatttataaaggaaagaggtttaattgactcacagttcagcatggctggggaggcctcaggaaacttacaatcatgacggaagggaaagcaaacacatccttcatatggcgacaggagagagaagtgccaagcaaagggggaaaagctccgtgagaatggaggaggtagttttcaggttctagtcactgactttgcccttaaacagaaagataattaaaccgtgctatgcagtctaaatttgtgtttttatttgtataacaattttcatcctctgaccatccctccaccccttctcttccttttctgcttgttctattaatgtcagcacaattggcagtagagtgggacatgatcctacttaatttggaaaagaatatgggggctgtaactgtttgcaacttgatattttgaagtaaattagtgtttttggagaggcagctcttctcagaaagtatctcacaactgggtactgaggtatgctacagcatggatgaactaaaaaacattaagtgaaagaagctagatgaaaaagattgaatctttatgaattgaattgaatatgtatgaattgtatgagtctaaatggaatgaaatgtccagaaaaggcaaatcaatagagatagaaagtagagtagtggttgcctggggctggaggtgggaaggaggagtgactataaatgggcacaagagatcctgttggagttctggaaatgttttaaaattggattatgatgatggttgcacaactatgtaaaggtactacaaatttttggattgtacatttagagaaaaaaatctgtatggtttcaactagatctcttaagaccccatagtatccagtgagattgttttcctccaaatgtatttttattttttgtttattttatttctgcaaagtgaaacattgagataaacttctgttttatattattttccttttctatgtcttgtatcacagctctccatcctgctgaaaaaccaagatgatcttgataaagcaattgacattttagatagaagctcaagcatgaaaagccttaggatattgctgttgtcccaggacagaaaccatgtaagtagcccttgtcatggtctggcagctgaagacaaagcttgctttccttcaggaacttgtctcgcctccttgacagacattttcgttcctcagccactgccaaattgagagcataagcacagcacagcccacttgtcagtggccagtgaacattctgcatttgatttcaccgaaaagccagattgtcagtgttaacattgcatctaaaggttatttgacttttggtgagggaggaaggaaaatactttatgataaagaataaaattcttgtgctctaaatttatgttttttcaattagattttgaccccaacaagagaaatttgattcgtttggcagtgccgattaggaaagactgtcaaagatttgagactgtcatgctttataaacccaactcccacaacaccttgcctttcccttggaacacttgtaggaaacaaacttttccttttgttcagtggaaaaagccatgggttgggggcctcttataacttatcagctgttgctttacccaatggcaggcagtctgtagggtgtcagaagtggggaattatcccttatgcacagtttcctctcctgaaggattcctggaggcccgcatttcacaagaatgcttgcaatctgtatctgtcttccaattactgattcttctaccagttttcttcagatgcatgtttctgaaggtttcttggcaccatttccttttcttatgcttgacaggctttccttttctttatgtggacagccaacatggcagcataagtgtgggtgtagtgactaggacaaagtttaggtggaatgctgctcatgctgaccatttcttttctttttttttttttttttgagacagagttttgctcttgttgcccaggctggaatgcaatggtgtgatcttagctcactgcagcctccgcctcctggcttcaaatgattctcctgcttcagcctctcgagtagctgggattataggtgcccgccaccatgcctggctaatttttgtattttttagtagagacaaggtttcaccatgttcgtcaggctggtctcaaattcctgacctcaggtgatccacccgcctcggactcccaaagtgttgggattacaggcgtgagccactgtgcccggccattttttaatttttttagtagagatggggtctcactgtgttgcccaggctggtcttgaattcctgagctcaaatgatccacccactttagccttgcaaagtgctgggattacaagtgtgagccactacacccagcctgtggtgaacatttttctatgttgtaattataatttgtaaggatacatgtttctcttgagtcgatataccataatttaattaaataaccatttttgctactgttgggacacagaaactgctcctgttttttgcatttataaatatttacatttaagagtaacaatggtaatgtttggtgatgaaatctttcctccagaacttcctcacctagactttaggcttcttaataaatggaagaattatgatccaaaattgctctgtgctcaggaatcctcacctctagaacagtgttcctctaactatatgtgatgaaatatcagttttgttcttttgatttcaaatctgtcatggacttttttttttttttttttttttttggagatggagtctcactctgtcgcccaggccggagtgcagtggcgtgatctcggctcactgcaacctccacctcccgggttcaagcaattcttctgcctcagcctcccgagaagctgggattacaggtgcacgacaccacgccccgctaatttttgtatttttagtagagaaggggtttcaccatgttggccagactggtcttgaactcctgaccttgtgatccgcccgccttggcctcccaaagtactgggacaggcatgagccactgtgcccggccgtaccagttctttttttaaatacaaaaactgagaagtgaaatggaaaaataaactagaggtatataaattataaggctacagttttcattagtagattcaataaacataaaatcactctgccaaattgctctaaagtttttcaaagggccctctccatttctttacttacttggtggaagagcaggacgagcagtataccagtgtgtggactggcaccagcccagatatcataccttaagtacactgctccaggatactatatcacctggtcttcatcacctccgctgatactgtcagtcactttgtttctccactttgaatttcctgcatttgtagcagttgcctcaccgccttttgttaccacctattcctttatttccctttttttttgagatgggatcttactctgtcacccaagctggagtgcagtggcgcagtgacagctcaccacagcctcaacctcccagactcaagttatcttcctcccatctcagcctcacaagtaactgggactacaggcgtgtgcccccatgcttggcttttctttttttttttttaattgtttgtagagacagggtcttgccatgttgcccaagctggtctcaaactcctgggctcaagcaatccttctgtctcagcctcgcaaagtgctgggattacaggtttgagccaccatacctggctgtttctcttcttgttcctgttttgaattgtgctatctctttcttctctttggattcttcttcttcttcttcttcttcttttctttttttttttatttgagatggagtttcactcttgttgcccaggctggagtgcaggggtgtgatcttggctcaccgcaacctctggcttccaggttcaagtgattctcctgcctcagcctccccagtagctggggttacaggcatgcaccaccacaaccgcctaattttgtatttttttttagtagagacggagtttctccatgttggtcaggctggtcttgaactcccgacctcaggtgatccgcctgtctcggcctcccaaagtgctgggattacaggcatgagccactgcaccccgccttggattcttctgatccctatatggcagcttctaattttccttctgtcttcattcctcacaaggtacatagtcttacctctcccacctcactttggccaaggccatgtctgagaggcctcaatattattcttgagaactcctgagttttggtaatcacagaactatctctttttttttattttgaggcacagtttcactctgtcacccaggtacgatctcagctcattgcaacctccgcctcccagattcaagtgattctcctgcctcagcctcctgagtagctgggattacaggtgcatgccaccatgcccggctaagttttgtatttttggtagagatggggtttcgcactgttggcgaggctagtctcaaactcctgacctcaagtgatccgcacgcctcagcttctcaaagtgctgagattacaggtgtgagccaccggatctggccagtctctttgtctgaaaagcctctctctagccttggtctctaccatcattttaagatacttcattgtctccttctgtagtttttgctgtcctaagcctctgctttggaccaccaacttttagcttatgcatctaacttttacatttgtctttcagctcttgaccttcttaggactttctagtctcagatcttccactgtcataaagtaatatcaagctgaaccttcttttgtaacttgtatttgtatacgataaaaactaaacacctagccactttgttttgttacctcatattcgcgttgacaaaaataagcttctaatcttctcacctaaatattgtaagttaaaaatatcaaggataatttaaaaggtaattcttttcagtccttgtaaaatagtgggacaggtgcaggaagataaaacaaacctgattgggcagaatagcttcttctggcccctgttaaaaataaacactgggccgggcgcggtggctcacgcctgtaatcccagcactttgggaggccgaggcaggcggatcacaaggtcaggagatggagaccatcctggctaacacgtgaaaccccatctctactaaaaaatacaaaaaattagctgggcgtggtggcaggtgcctgtagtcccagctactcgggaggctgaggcaggagaatgacatgaacccaggaggcggagcttgcagtgagccaggattgcgccattgcactccagcctgagccacagagcgagactccatctcatctcaataataataacattgggctgggcatggtggctcacacctgtaatctcagcactttgggaggctgaggcaggcagattacttgagcctaggagtttgagaccagcctgagcaacatggcgaaaccctgtctctattgaaaaaaaaaaaaaaaaaacgaaaattagccaggtgtggtgcgtgcctgtggtcttagctacttgagtggctgaggtgggagaatcacctgaggccgggaggttgaggccgcagtgagccaagattgcaacactgcactccagcctgggtgacagagtaagaccctgtctcgaataatagtaataataacaacacctagcacataaaaagtgtttttatctttcacttgatttttacaactctgagggtaccagggcaggcgtctattatctccagtctacatctggggaaactgagacttagggtgactgctcaggtgaggcagtgtgtagtgacagagctggtctgaaatccagatgttctgacttgtagtctagtgcctgtcagtcaccatccagaagagggaatttttttttttttttttttttttttgggatggagtctcactctgtcacccaggttggagtgcagtggcgcaatctcagctcaccgcagcctccatctcccgggttcaagcgattctcctgcctcagcctccctagtagctgggattacaggcgtgcgccactacgcccggttaatttttgtatttttagtggagatggggttgggcggggggcggtcctcaccatgttggccgggctggtctcgaactcttaaacttcaaatgatctgaccgccttggcctcccaaagtgctgggattacagttgtgagccaccacgcccggccccagaagagggttcttagaattattgtagtccttgggaaacctcacccaggtgcctccacggttggaaatcattagaagccaagcagaaagtataatactgtccatgaggagaacttgtgagatgttgtatcattctgttccctgcagctttgaagacaactgagctagcaaatgtccagaagacaaaattttcaaggagttggagtcactttcatatatgaacagtgtaaaagtttacaatgcttggccaggcgtggtggctcatgcctgtaatcccagcactttgggaggctgaggtaggtggatcccttgaggtcaggaatttgataccggcctgaccaacatggtgaaaccctgtctctactgaaaatacaaaattagctgagcgtggtggcgcatgcccgcaatcccagatactcgggaggctgaggcaggagaattgcttgaacctgggaggcggaggttgcagtgagccgagattgtgccattgcactccagcctgggcgatgagcgaaactccgtctcaaaaaaaaaaaaaaagtttagaactctttagttaggaaagacagcctaagcatatataatcagagtctttaaagcgtttaagagcatggataatgaagacacggatttattcacctaatctcaatttggatgaactccttgaatattgagcattatcttagaacaaaaaagaaataatttgtataacaagtgataaaccagcctgggtaacatagcaagacccccatctctacaaaagttttaaaatcagtcgtggtggcaaatgcctgcaattccacctacctgggaggctgaggcgggaggatcacttgagccaaggaattccaggctgcgatgagctatgattgcaccactgcactcattgagcaagaccctgtctcaaaaacaaaaaagatgatatatgtggcatctattattctgaaattgtgtagcttcaaagcagattttaaaaagggctttaggccgggcgcggtggctcacgcctgtaatcccagcactttgggaggccgaggcgggcggatcacgaggtcaggagatcgagaccatcctggctaacacggtgaaaccccatctctactaaaaatacaaaaaaaaaaaatagccgggcgtggtagcgggcgcctgtagtcccagctacttgggaggctgaggcaggagaatggcgtgaacccgggaggcggagcttgcagtgagccgagatcgcgccactgcactccagcctgggcgacagagcgagactccgtctcaaaaaaaaaaaaaaaaaaaaaaaagggctttaataaattcatggatggtaaagctgtaaatttaattaaatcacctcagatgctttcacagctatcataactatcatggtcttccatgcaaatatctcttggtaccaccattaaaacagaggactggacaggatgctcttggtgatccagtgtgccatttcttaccttacattcccatgtaacaaactaaagcaacccctctccctgcttcacctcttccctgcatcgttgaatccacttgccagattttttattgagataatttgtgggtggacttttgtaacttatttttctactgatctcctatcttccagtcactgaaatcttgatgcacatggtttcctggtaatttttcatattgtttgtgttagccacagctaacttctacccagagtcctttagtgaggtgttcatggaatgatcaaacaccatcttctatttgttgtctttagaatgttctgctagctacacagttcatacctatgggctctcctgtcactctgcgacagtccccttatattctcaggcatagtcccaccttcctccttcctctttttcccacttctgagtcttattcaaggtgtcctaaacccttgaagcaacctcatttttatttaccataccattcccttttgcccccttaaattgaggttttcaaaatttggctgaatattacaaaatgtcagtgcttggactctgtgtccagaggttctgttgatctgaggtgtcaaaatctccacaggcagctgggcatggtcgctcacccctgtaatcccagcactttggaaggccaaggcaggcagatcacctgaggtcaggagttcaagaccagcctgaccaacatggagaaaccccatctctactaaaaatgcaaaaaattagctgggcgtggtggcacatgcctgtaatcccagctactcgggaggccgaccaggctggagtacagtggtgcgatctcggctcactgcaagctccgcctcccaggttcatgcccttcttctgcctcagcctcctgagtagctgggactacaggtgcctgccaccacgcccagctaattttttgtatttttattagagacggggttccactgtgctagccaggatggtcttgatctcctgacctcatgatccgcccgcctcagcctcccaaagtgctgggattataggcatgagccactcccggcctagcttttagattttttaattgagggtttagatagtatgtcctttggtacacatttcaaattcatgttgccatgattttttgaattcccactatgtgtaaggccctgcattcaggcaggtggcagggtgctcatcatgcacctcctctttgtgagtgcaagactatgaccctcccttgcccttcacttgcctgcctccccagtatgtggctttgactgttgtttcctttttgacccttagcagagagctattgcacatcggaggcttcagcaagaacattcacttcccccttggttctgacttcccgttagagcaagacagtttttcaagacaacctgcatgtgataaagtctggcatggggactacaggaggttgcttggcagctgaactctcccctgagagcaggaaacctttttcctggaggacaggatatagagtttgtttagatcggactttttttgttagggggaggtagaggagatagaggagcaagtagaaactttgaaccaacttgtttgtaaatcctgagctctcaccccgactctcaccagtgccctgcttatttgtaatagcatcctgacatcacttgattacctccagggtttagttttaagctttctcagtgcaaaggcccccctttgttgcttagttttctctggcggctggactgggcccagtggaaagagtgggtgggtgctgggaggattgctgaccctcctctcaggcccttgacctctgtctggcacaatggtacttatgatagcttttcccaattgaacatgatcctgagatgatttgtgtgtaaaccctggaatcttcttaattttcagggagtgattattgttgggaaaaagaagcaaattgagctacttttaaacatacatatataagctgggcatggtagcatgtacctatagtctcagctaacccggaggctgaggtgggaggatcccttgagcccaggagtttgagtccagcctgggcaacatagcaagactctgtatcaatcaatcagtcaataagataaatacatatatagcaaccagaattttgttggggagggaagttgccatcattcactctccatcctgacttcctcctctgcagaaataattttctgctactcttcctaaactctctggagaattttatgagagggtatttacagctctcttttctgttttgcagattattacaggaatgcctgttattcctccatgtctggatcatcacctgttaaactggggcactaggtctcagcgctcatacatcattgaagctataaaactacattgagcgaatagtggtttgctgagacaaatagaagagtgagatttgggggaaagctgggtagctcatgtattaaaagcatgaaggtggctgagcctgcagggagtccttaggaaaagggtgagaagaccttgataggcctgactgtgtaaagatgtagcttggcctttttcctcttcttttacagaacagttcctctccccactctggggtgtccagacaggtgcggatcaaggcttcccagtccgcaggggatataaatactatctaccagccccccgagcccagaagcaggcacctctctgtcagtgagtatttcaacccttttttctccccctctattttatctgcccacattttaaaaaagcaacaagtatttgttaattaaataatcatcaaatatttattaactattactctgtgtagagtaatcctttatgcctttattttatttagagaggaagggcaaagaaataactgggatggtatcctgactctcaaggaacttaaaatataatgatatagtagtgtgattaaattccttttaaacatccctgaaaaagtgattgcctcagacatctgcttgaagacttccagctgtgtttacactcacttttgaccattcttgtgaagaatagagacttgtaaagttaggaatcgggtctaagtttgaattttgaccttaaacctcttgcttatgattcctgagaagtctttatacttcagggaagatagtgaccaatgaaacttttgagagagtcaagctaagttgtctggaaggaaaggagactattgacatagtacagtcatttctctgtgtttgtaggggattggttccaggacccctgtggatgccaaggtctgtggatgctcaagtccctgaaataaaatagtgtagtatttgcatataacctacccacatcctccttcatagtttaaatcatctccgggttatttataatatgatgtaaatactatgtaaatagttcttatgctatatttttatttgtatttttttgctattgttattttttataattttccatatattctcaatctgtggttggttgaatccacagatgcagaacctggagatatggagggccaactatatatacaaccctctgctaactagtcagaaagctctgtggctgctaccagtccttcccaggacaggaatctaaatcaggcctgtgcattattacttgttaacccaggattcctgtggattccacttttgggagtctggggagaaagcccccatttcttgaattgtggaacttgtatcaaaagggaaatctggtcttatcaaacatcgtgttgagcctgctgccttaatgttgtggagacccctgctgctgctagaaagccagctttgcccttatccatataggtagaattgcttcaaattgaagtgtcctctgaagatcctgagctgagcttgagagatctaagcactgatcctgttgctgagtttgtctgtttgcaatatgcctcctgagggagttacaggaaaaatatgtttctgaggtactgactttgccttactgagtaacttctggaatccaggcaagtactggtagtaagtattgccaggctgaaagtctgtatatgaatttcagatttctgtagataattggggaatgtgttggttgaggatggagagctagtaccctagcaaggagagcctagccacagcgtctctggccctggaatctgtgtgcctcagagcctgggaagctctgccagtttggcctcttttccgtagtccttgtagagattgaggggatggaggtgggcagcatggtcccttgtaatcagtaaggattgatggggcagtaactgggtctcttgcccccaagcaagagcctatgatatgtgcatggaggcaggggctaaatacttagccactggaccctttctccatgttaccgggagctatatatggaaatgattttcctggctgagaatgctgaggagtgagatttctgtgaagtagttcctgtttatctggaaaatgggcaacacggcctcttagcatacctagatcctggcttccttcattcagcaaagcattaagtaccagctgttgggctgagatgaatgctgcagtgaagcatttgaaagagcaagggtggctggagcagattccgcctgggagagaggggctttcacagaaaaggtaacatcagagctgacactccaaggaagatttactgagcatcaagtagagagagatatctcaggcatagtaaggagcacctgccaggcatgatcacaaaagaacttggtgggttgaagaaccccaggggctttgcactgtgtgtagggtaaggtagatgtggcaagagaatgggctgagcctgtgagcgtttccatagagccaagaaatgggagagatgatttctaactggaatgatctggaaaatgcattctgaggggagctgttccagctggaccttgaaagattgtggaggatttccacaggggacaaggggagagaggagagggcttttagactatgtctgtggagagctcgctattcttcaggtccaggctggctgatacatttggaggaggaatagagaggccaagaaaggatgcctgggtgttttctaagggactctcagctgcactcagactcttttggtaggcagtggaagccactgaaaatgtttgccccttatacccatcaccattataatatttattatgttgtctttttttttttttctcgagacagagtctcactgtcacccaggctggaatgcattgatgccatctcggctcactgcaacccctgcttcatgcgctcaagcaattcttctgcctcagcctgttacaggtgcacaccaccactccctgctaatttttgtgtttttagtagagacgggatttcgccatgttggccaggctggtatgactcctgacctcagatgaccacctgcctcggcctcccaaagtgttgggattacaggcgtgagccaccacgcctcaacctatcatgttgtcttatctttcttccatcatactacgtttttgttcattcattcaaaagataattactggctgggcatggtggcttatgcctataatcccagcactttaggaggccgagttgggtggattgcttgagcctcaggagtttgagactagcctgggcaacatggcaaaaccccgtctctacaaaaaatacaaaaattagccaagtgtggtggtgcaagcttgtagtcccaggtacttgggaagctgaggtgggaggatcacttgagcctgggaggcagaggtttcagtgagccatgaatgtgccatggtactccagcctgggcaacagatcaagaccctgtctcaaaaaaaaaaaaagtaattaccaaagtatctactatgtgccagaaatatgggaagcaaaaaagacacaggccctgtccctgtggcctttacaatccatggaaagacagacatttacttcttatgatgtgattaatgtataattacaaactgtgactgaaaggtgtgtggtgctgcaggtgggctataactaagaaatgggctgggcatggtggctcacgcctgtaaccccagcacttggtgaggccgaggtgagtggattgcttgaggccaggagtttgagaccagcctgaccaacacagtaaaaccccgtcactaataaaaatgcaaaaattagctgggcatgatggtgagtgcctctagtcccagctactcagggggctgaggcaggaggatcacttgaacctgagagatcgaggctgcagtgagtggagattgcaccactgtactccagcctgggtgacagagtgagtgagactctgtctcaaaaaaaaaaaaaaaaaaaaaagaaagaaagaaagaaatggtgggctataactaagggatgggacctgatcctgatcttggggccaggaaagccttaggcatgaatgggatttgggaattaggcaaaagggatgcaaggaagagggttccaggcaggggatgttacaagagcagagacttgatggcaagaggaagtgtggtatgtcagaaatggaaagaagtccagatagctggagagctgggagcaaggggaaggggagggcaggatgaagctggggagggaggcagagccttgtggaccctggttaagattctgatcattgcatggaaagtagtgaaaagctactttagagtttttaagtgaagaggagtgggtgatgttacatattcgtatttgtattttgaaaagattgatctggctacagtgtggataacagattggagggggcaagaatgcatgcaagggaactgcattaggctaatgcagtggtccaggtaaagaaaactgggcttggagtaggctgatgaagtggagagaggaaggagcaggtgaacttgtgacatttagaggtaaaactgacagaacatggcgttttggtggttctcaaagtgtgttctggggatcctggggagtcccttggatcctttgaccctgtgagttcaaaattattttcttttttttttttttgtgacggagtcttgctctgtcaccaggccgaagtgcagtggtgtgatctcggctcactgcaacctccgcctcccgggttcaaacgattctcttgcctcagcctcccaagtagctgggactacaggcatgcgccaccacacccagctaaattttgtatttttagtagagacggggtttcaccacgttggccaggatggtctcgatctcttgaccttgtgatccacctgcctcagcctcccaaagtgctgggattacaggagtgagccaccacgcctggccctcaaaattattttcataatcatgctaagacatgacactcaattctctcacaagggtacaatggaggtttccagaggtcaggtgcctgaggtgatgtcatcaccgtaatggcttaatggcatgtgtgcttgtatatgattgtattcttaaaatttcttttttcctccactggtttctcctgagaaaatgtttttaaaatttctgagttttaattgcaaatacagtaaatatcagttgatatatcctacataaatgaaagctaagtggcctcagttttaaggtacagaggggttctaagaccaaaaggcttaagaattactatagtattggattgaatttgcaggtgttttcaggaggctaaggtgggaggatggcttgattccaggagtttgagcttagcctagacaacataatgagacccaatatcatttaaaaaaaaaaaaatgaggccaggtttggtggctcacatctgtaatcccatcactttgggaggccgagatgggtggatcacctgagattaggagtttgaaaccaacctgaccaacatggtgaaaccccgtctctatgaaaaatacaaaaattagttgggtgtggtggcatgcgcctgtaatcccatctactagggaggctgaggcaggagaattgtttgaacccgggaggcggaggttgcagtgagccgagatggtgccattgcactccagcctgggcaacaagagcaaaactccatctcaaaaaaaaaaaaaaaaaaggaaggaagaaaaaataatttgcagatattgagagagagggaggtaaattactgctttgtggagatgaataaatggcatcgcctttcactaagacaggaatactggaagagagcctggttccaggtgctgggaaggggcagacttaatgttttagacatgttggtattgaagtgcctctgatacagccaacaggagatatcagagaggcagttagatatataggtctctagctcagaggggagaaaatcagggctagtgaaaaaatattggaaattgttatgttgaaaccatgcacccaggcgagagtgcctaagcagagactatagaatgagaagaaaagagggtccatgattgagccttaggaacccaacacttagtggccagttagaagaggatgagcctgtgaaggacacagaaaaggagtaaccagagaagtaggaaaggaaattaggagtgtggggagaaggcattacacagaaccagccaggttggtaaggacagaccaagggtaagagacagaaacctgttattttcattcacagatgtttgagtgcttgctgtgtgctggtacagacaagactttctggaagggaaacagagacagaagtcaaggtatagcatgagagacttggaaaagtcctagcagtagaaatggggtccaagaagtccttggttagtaagccttagcaattcagccttccactgggttcctctgttgcctccttgccatcatcgtttacatacatgtgaatatttagtgagtctgcagcaagcaggctactcagttcacactggaacatttgcattgatggggaagcgcagggtagcccaatcaaattccagacatgtatatttgaaattcttctttattttggattgaaaatcagctttctctcactttacccactgattctagtgctgctcccttgagcaacagataaacacagataaaatctttcatatgacagtttttcaaacatgtgaagccaggtatcatgtttaccctttgttgtttccatcataatatgcataccttgaattccaggtttttttcaggccatttagtctgttaaactagttcatgctaaacaaaacagaaacaaacaaaaaaaaccctactaagtaatgagttaatccaaaggaattaatctctctgtggggagatcactaggcagataggtggaatttccttacctgaagacatcctctctcataccttggcctacggaaattctacctacctttgaagctcaagcactatttttccatgatacattgggtggtgcccttaagccatgtaaccaagcctcaactaaaggacttgtcggcggggtgcagtggctcatgcctataatcttaacactttgggaggccaaggcgggcaaatcacctgaggatgggagttcaagaccagcctgtccaacatggtgaaaccctgtctgtactaaaaatacaaaaattagccaggtatgatggcaggtgcctgtaattcgagctactcggctgctgaggcaggagaattgcttgaacctgggaagcagaggttgcattgagccaagatcgtgtcactgcactctagcctggacagactcttggtctgtctcaaaaaaataaaaaataaataaaaattatccaggtgtggtcgtgcgcatctgtaatcccagctacttgggaggctgaggtgggacaatcacttgaacccgggaggcggaggttgcagtgagctgagatcgtgccactgcgctccagcttaggcaacagagtgagactctgtctcaaaaaaaaaaaaaaaggacttgtccctgctacattctgactcctgtatggtctaagttcatcttgttaagtgcctttgcctcagttctcactctgtctttctccttatcttgccactttgtcccatagtgaggcaagccatactccaacgcctgagtggaggcaatcaggtttttctggagtttggtagtgaaatggtggacctgccagttgcagtggtgcgtacctgtaatcccagcactttgggaggccaaggtgggtggattgcttgagcccaggagttcgaaaccagcccaggcaacatggcaaaaccccatctctctgtcacccaggctggagtgcagtggtgccatcatggctcactgcagcctcaaccaccgatcctcgcctcagcctcccaaatagctgggaccacaggtgcttgccaccatacctggctaatttgttttttgtagagatgagttctcactatgttgcccagcctggtcttgaattcctggtctcaagcaatccttctacacctcagcttcccaaagtgctgagattataggtatgagccaccatgcccagcccaggatgttcttaggctagagatatgaggaagtgtatgaagggagggataaagacagctgaaaaggaggggttaaaggtgatgaagaggagaccatgggggagctgactcctgctggagatgaatcgagtccaggtagagggtttataatacttttgcaaggaagagaggagccctctctgcctctgagagacatggagggaaaattcaggcagaggacaagaaagaatgttgaaaggatgagggtagattatagcgacaactgggcagtaaacagagagcagtgctcaggaccagcttccagtcctagtaccgatttgaaagggtagaagccaggactgtagaggtagtgaccatacacttggaaacaaaatggttagcttctttcatcttcaaaggttttttttccctccttgctataagttctatgatgctacatgagatcagaaactttgatggtggtagcagctccaaaataaaatgggaattttgaaagttgaaacatagaagatgttcttagggtcttatggaaattctacccactactgtgttctacagagtgtggtccactgtgagcatattggtaaatattagttaagattttctattgagaaagaaaaaaagtttgatttctctccccatctcatctgtccctgaagagagaaaagagtttaggaaatagttagtggccaaaaaagctatctctttatacttgcagtgacctgcacattaacactgacccaaagccctagaactccctgcggagacaacttcctgactgcatcagcttcctgattagggttctgctatgagaagggctagaatctgagagcctgtcgttcagctttaagtcagagtacaaagcaaaagaacctaccatatccgagggtgagagtgtatctttgactctgcttctttgggttaaggaggctggtagagagctagcacgcactgggtggaatgaggatagctggcagcttaaaccccgcttttctccttctgtgtaaaataccttcatgggaaactgtgggcctctctctgaacagtggaactgctactgtgctcctttgcttcagctggtggcacaggtggcgcagtgaggctagagcaagttcaggctggaataccagggaaaggtgtcccaagaaagcctgtgacccctgcctatgcagccttctgagacctacggaatgagctgttttgcatagctctgtgctttgggctgtctggctcattgctatcactgctggtaaatacgtagttttatggtccagtatcctatcctgtttagctccctgtctcacttgctctcaactgttgtgtatctcattggctcccaatttctgaaatgaagattaaaaacaaaactgaaaatgccctggagcagttctgccaactcctggtttttccattcggttcctctgatagccactggtttggggagacttccttttcctgctccagcctgtgggcctgtgcacaatagccgctggcacatagcccatcagataacaaggctggctctctgcaggcacagtgtggattggaaaaagtgaaagtttctggctggaaataaaagctcagaaaacctttgctatttttccccccagaccctcctgggtctgtagtgctggcctcctgtgagctagtcccatcccacctgtaaaaccaggggagagttcagtgcagctgatgaaggaggggacaggtgtcagggggaccatggatattttatcccagggaagtctcaccccagacactccatgtaacagattgagggcatttcatcctgcctaggcatagtttggaccagtgtctgaggtttcataaataagagtttttctttctctccaatcagtcccttacaagagacatttttatttgttctaggtaaaatgtataatacagctccagagtgtgttggtcagagttcagttgtgcagaggagaacccactgtagctagtttcaggaagaagaggttccataaaccagaggtgcacattgtggattatggaatcaatgagggaagaaagagaagcagcctctaggttaagacacaccacagagcgtcctccctcttctgtaatcaggaagccaccggtccagaagtccagtgcccctcaggtctggtccacacctgtcaacatcggcaaagctggagaccaggtgtggggcctctgctaacactgtggcagaaaaaccaaaggcttctgtgactgctcaggaacagcaggaagcctgttaatctcatagaagtgcatgtgattagctgaatctaaagaaagtcttagaaatacagcttttagccagttagcttctcaagtacaggaaggcacagtagaagggtggaatccatcttacgcctaccccatatatctgccacatagagtgaagggtacaaatgggattctacggagttcctactgtgagatggggttatgcggatatgtacctgtgccagcacatttataacttccgaaagaaattatgaggtagatagttctccccatttttgcagttgaggaaattgaggtgagagcttagatcatttagctaatgagtggcaaagcctgatctgaacccacgtatatctaatttcaaagcttagtcttttctccgtgcacctcacttacctccttagagttgcttctgctgctgacaaatgttgctgacatgtggattgaattgccatagaacttgtggactaccaagatgtcatccaaagctaaaagtaggaagcaggcagtaggctaatttttataagcaaagggttaaatagtgctctctctgtgttttgtgacatgataagacttaggaaaaccatcctttttttacagttgcactggaattttgtgttacagtagcaagggaaacagccaggtacatgggtctgtgaggtctgggtcactggaaagtggagtagttcccttggtccagatttcccctaaacctccatcttgtctttgcctacaaaccctctgttggccaagcggcattttgtattcctggcctctgactcccaaatgaccatggagaaaacaactctgaatttgagctgcatgaaacatgccactgtggatgtggctcacacctgtaatccctgcactttgggaggctgaagcaggaggatcccttgagcccaaggagtttggggctacagtgagctatgaacacgccactgcactccaaagaaagaaagatacatggcactgtgcttcccctgtgctgccaggaagtccccacgttagcctccctcccacacctggcaggctgtcatatttccttgtggatgggatctccatcctccatagggattactcatgggggacagatggcctggccagttcaaggagaagttatgtcttgtgccactgtgttgagcagcatgcctgccctttttggaaataaattatggtccccaaattgccttggctgaactgtatgagagtcacaaagcctgttttctcgcttcggccccaccataaagtcactttatggctttggggcttgggtttccctctgcgcaatgtggatgatgataatgcaccaccactgcaggggtgtagtaagggttaaatgagaggtgacaatatttttttaagaaaaaaaaattgccttgactgattttattgctctgttagttcatggtacaatatccctaaatttacactcagagtaactttagtttctgttaggacttagaaaataggacaaattctcttccatgggctgtttgagaccattgcaaaggcatggctcagataccactttatctcagaattggtggcctctaccctgtgagtgagatgttgagacaggaaatccagcaaaattctatgcctgttttcagagcaattttgtttctggcctttgctctggagtcaggtggggaggccagattactgaggaccccatgttagctttcctgccagagagacatccttggagggaggctggggtgatgtgtccaagaagagattggaagtattctccaataccagttcagtggtgaattctcaaaatgtattcagcacaaccacatgaaccatatgttctgaacaactgacttaatatagaagaattaaagagtcagtttcaactgggtgcagtggctgacgcctgtaatcccagcactttgggaggctgagacaggcagatcacctgaagacaagagttcaagaccagcctggccaacatggtgaaaccctgtctctactaaaaatataagaattagctgggtatggtgacggccacctgtaatcccagctattcaggaggctgaggcagaaaattgcttgaacccaggaggcggaggttgccttgagccaagattgtaccactgcactccagcctgggcaacagagcaagactccgtctcaaaaaaaagagtcagtgtcagtttcttaaaggtcattgaaaaacaatagtttaagcttcttagaaaatgtctttcaaaaagcaaccctctggccaggcatgggggcccatgcctttaatcccagcactttgggaggccaaggcttgagaccagcctaggcaacatagcgagaccctgttcctaaaagtgcacacacacacacagagcaagcctccccgccattctttttttccattaagtatttttcttccttctgagggtctttgaaatagtgggagtctctctggctcagggagtttgttgagctccatcagtctgtcaggcccaccctcttttccgggatgttctaagaccctggactgggctcttgagcaccctctgctgtagatgcttagtccctggtgcactacctctacttccaggtacaggctgagtgctcctggctccacatgagctttgttgttttgtctatgagacagggtcgcactctatcacctatgctggagtgcagtggtccaaacacggctcactgcggcctcaacctcccaggctcaagcagtcctcctgtctcagtcttccaagtagctgggtccacaagtgtgcgcctggctaatttttaaaatattttttgtagagatggggtctcaccatgttgcccatgctggtctcaaactcctggcctcaagcatttctcctgcctctcgaagtgtcgggataataggtgtgagccactgcacctggccacacatgagtttttgagcaataggaaatatatatacatatatgtataaacatgtatacacacacacatacataaaactaaaactgtgtatctcagattttccatctaaaactggtctggactagggatctatcatcaagaaaggagagaagccaggcatggtggcacctgcctgtagctgaagggggaggattgcctgagcccaggagctcaagactagcctgggcaacagagtgagaccctgtctctgaaacaaaacaaaacaacaaaacagaatagaatgagtcaggtacttccctaggtctccagctaccaaacttggtctctcttgcttccttagccatttccacagagcatcttgcctgcagttccatttcagaaaacctagtgctacagcccctgaactagactggagaaaccagccagcaaggaaagtaacctgcattgttgagggatggtactactctattcctggtgtctgggaattgctgggtcgtgggagagaggtaaggggtggtagataagggaatggagggctcttgtgtctctggttttctaaacaacaggataaatttgttcccttcagaacaggaaaagggttcaggataagagtcttacgtttaagttttgaagctacaagaaatatttgtgtgggtatagttaaagctttttttaaaccttctgaaaattggctcttctggtttggtgagcttaggaaggaaaaaagatgcaaacttttggcctcatttttgtcttctctgatcatggaaagcaacacagccagtcagaaaaagctcttgggctaggaggaaggaggacctgatttctcggactcaaaatcccttatggcagaaaaacattgctcagtgacttacaaagtgtgtcatttgtaagactgcacacctctgtcattcactaacattaggatgataaaccatttcatcttacaagctgatgtggtgaaagtacctgttaattggttttatagtctcttatctgtaaaacataaataattgtttttgggtgttttgggttttttttttttttaagatttaagttccttgagtctccgtctcctcctctgttaagtaaagcaaatgcttacctctcaggattgttgaaaggattaagtgaagtaacaaatgtaaaaataccttgtggaatgattgccacttagcagccactcaaaaaatatttgccaaacctctgttgtagagatgttgaaaatcaaatgaggttaattactgtgaatgtgtaacaaaaagtaaagcaccacataaatgcaagataatatcattactcagaccaacctgagcaacatagtgagaccctgtctcaatttaaaaaaaaaaaaaaaaaaggtaatatcattactcataagccaggaagtgtgggagtgggtaggaatggagaagcctgccttttgatcctggccagaccatcacgaaggcctttttacctgatacaagtagagaacaaataaggggagacactggctgggggaacagggcaacagagagagatgcacaggtatattcagttacctttccctggtccccaccctcaaaatactgcttggacccaaaactaaagaggactaagctgatgtattgagctgatgggaggaaatggcattagtgctctagaggaagagagaaggtgacattatgaaggagtaattatatataagaatttttttaaaagctagtctgattgccagctaaaatggtctcctaggggttattctggtttctgttttgtgtcaaggtttttttggtcggatatgccgtagtgcctgctccatctctggagtttgtttcctattaggaagggactttgtttgcctgagggagctggcacatgctggacgttggtgccatgacccatctgagtcacattcctgacctctagggcctaatagttggccccatgcctgctcctcttgggccacacaccctgggctctgttgttgaaagcctcctttatgtgctctaggctcccagaaccctggccgaagctcacctccccctggctatgttcctgagcggcagcagcacattgcccggcaggggtcctacaccagcatcaacagtgagggggagttcatcccagagaccagcgagcagtgcgtgagtataggggggctgggatatgcctgtggcctgtatcagcagaccaagctcataacaaggggttcttagtagtcacagtgcagaactgagggacatgaaccccatttgaaagctcttttataaaccaggcctgcccaaatatggattgtccctttttaagggccaaataacaatttctgccaaagatgggatctaaaggatctaaactacatagtttccttgttgttgggtgaggatttaacagatttttcttcatcgtggtcctctcattgttcctacaggcaggcaccaccacgcccagctcatttcagtagtgttttaacatacgactggttctaaagtgacaggttatgtttttcattggatatattttagttttgctgtttcttgatgaaaggtaaggagtaaaccatatcaaaattacactgtaggattggttaggctgatcatttatgatggtagacagttgtattagttatctattgctccataacaaattaccacaaacctagaggcttaaaacaatatacatttatcattttccagtttccctgggtgaggagtccaggcatgactcaaatgggtcctctgctgagggtcacacaagactgcgatcaaggtgtcagccaggctgcctgcctttcttgagtttgaggctcttttctaagctcagatggttgttgccagaattcagtttttttgtggctgtaggactgtggttcctcttttcttctgaatgtcacccaagggcttctctgagttcccttcctagaggccacctgcagttccttgccatggggccctctcacaacatggcagcttcttcaaagccagcaggagaatcttttgctccaatctgcaaagatggagtcataaaacatcacataatcataggaatgaatattctatcctctttgccatagtctattggctagactcacgtcacaggttctacttgcactaaagggaaaggcagttcattgggactaattggaagagggagcaatcaccttagggtgtgtctaccacagtggctcagccattttagtggctagcttttaaattggtggcttacttgatgcaaatggcaatttggcttagtgaactcaccaagcatgagatctctagcttcattctggtcttttcaataaacttgctttgatgtaaaagaaaaggctgctcttacactttctgggcttggcctgagaaggggaaatttcttaaggggaaaatgtccaacagaagggcctgtgctgtcacatgggagatcttataaaaagctgattcttgtaacttttctttcattattcaaactatgtaggctatgagaagccctttgtactcttcttccttctatactcctgccttccagataaattcatgtttggagtagtgacctggagtgccattagctgcagatttcctttttgggcattttactgaccatcctttctggtttctctaaccagggcacttctggacatcagctgttctaggggtgacttgggtgtaaaatcccagagattgcagatgagcttgattgccctcagtctatgtccctcgccatggtcctatactctgcccccttcacttttttactttgcctgcatggccctggaaggcctgggaggatttgactcccagtgaggacagacttttagaaagaggccaaggaaggcagtggttggggattgccaaggtcctcccccagcgcctgcctctttagctgaagagaattgctcctggtaacaggccatttgagatcaatctgcttaacaggaacgaacactgcatagtatgtaataaaagaatattccagtgtgactttactgaaaagtgaaaatatgataagttttgttttttctttaatcaggtttaagcaataattgcatctatttactaatttttagaatgagcaaagcatgattcatgttaattttttggcctaatttttccaacaaaaattatgtcagtccggtcgcagtggctcatagctgtaatcccagcactttgggaggccaaggcaggaggattgcttgaggtcaggagttcaagaccagcctgggcaacatagcaaaaccctgtctctacaaaaaaaaaaaatttaattagctgggcatagtggcacacctgcctgtagtcccagctactcgggaggctgaggtgggaggatcacttgagcccaggctgcagtgaattgcactccagcttaggtgacagaatgagaccctgtctcgaacaacagcaccaacaacaaaatgctagcacaatgtaacgtccttcactccctgcttgacttctaaccataaagaacgtcattttttacaagagcgttcacaggactcagcagttttccccaaggcctcttgtgaatctttggtattcttcctccaccacacctgccatgttatttatttgtccattttgtctttttctgttaactagtctaaatttgccaaatatgcatctgatggatttaaagcaattctctccgatgttggtttcatccactttggctatcctatatccttagcaacatttgcagttttactttgcaattaatttgccttgattggcagattttaaaaaatcatgtgtgacaacatgacttaaagcatttgaaattatgggtggggatggaccctggtattaaatgggaaaaaatatttgagttggaaactaattttatggaggtcgttagtgaattttcataattctgatactttgtttccctatgtaattttttaaaattaattaaaaaaatatttaaacagaaacaagatctcactatgttgcccaggctggtcttgaactcctgagtgcaagtgatccttccctctcggctcccaaagtgctaggattacaggcatgagccaccaagtctggcccctatgtaatgtttaatgttggagctcggataatgaatattctgaaattgaagaccccaccccaacttttgtgcagagaaaatgaaagggaggaccttcaggacattgattggagaaaaagggattccaaaggccttttgttgctgcatttgaccaggggccagagaaatattttattatatttagatatctattacctctgcattggaccaggaactgggacatttttgttctggtatcagctgtgcactaactagttttatgactttagacaagtctcctaacctttctaggcctgtagtgctcatctgtgaaatgaggcaatccttgtctttgtaaattataaattatggagtgtaaacagaagcattaaggtcccacccgaactcactggaaggctcagcagggtagtaccatctccagcgccaggctccagtgttaatgagccaagaacatgccaacaagaaaagcagagcctctgctttgctctcctgccagagctccttgggatgccagccaagcatttttctccctcctggaaacttgcctttcaaactaagggggaggatggtacctttctaactattcttcccattgcatggggagaaaaaggacactttcatgttttgacaaaaaggcccatttgctggcccttgccataaagcctgggtcactggggggaattggggctgggggtgtggcttcattgtttgacttgccttacagatgctggatcccctgagcagtgcagaaaattccttgtctggaagctgccaatccttggacaggtcagcagacaggtatgggactgtgggtggtttggagggtaatgcataggcatttttggaattgatgggttgaggaagaagagttagctctggaggcccagggttaaaacatcatgcttctaggaaaagccttctccttaatttccccaacaccacgagaatgttatgatggcataattaaatgaatgtaataatagctcataaaatagcagctcatttattaagtacttgctttgttgttctaagtgctttacatgttttgactttccatataatatatgccgctctcgtacttttggcctcactgctgtgatctgaactgagaaggagtggactgtcagtgttttagggggagaactgaattctcatccattgctttaccatcattttttattccaagtgtttttggtggagtaagaaactgaaacccaaaaacagaatatccagaatgcctagtgtaccatgccacctgcttggtgtatatcttcttcttacactttgggaggaaacaagtggtgtcctttacataccaaatcgcaagggtatgtttggagaggccttggcattgatcttgccactccctcgcctctgcctcattatgcccaagaacacttttgatcacgtctgtctgggcttaggactgtggtcagaggctatggaaaaggtttggggatttttttactttgtgtaactgattaattgttcatttgggtagtgatattatgactatggctaaatttgcattgtcttgcctaatagacctgagcactgatgagcactgtcttccctttagatatcatagaatacagtcatggttacttggtttccaatgtgtagccttgtttggggcttgctttccaaccaggggagtaagaaggcacaggcaagagtgccagggcttgctgtcatagactgagggctctgccaagacagggattgactctggctttggattatctcctaagctttggaggggaaaggggagagaagaggactacagaaggtctagtagttgggaaatgagggggcagcccccttgtgccactgccttgagagtttcaaacctgtggcccccgcaaaaggccaataagcactcttgtgtaagggaaagggccattcaggtgggtgctgggaaagatagctaaatttacccgcctctctattcttgggttttttcctctgtgcctgcagtactttgttttcttctcattgtgaatgacctggacttatttccttgaggtccagcctgacttgggctcagggctttcatcttcccttcacgggatctgggaaagggcatgagatctggagccagacaaacctagatccagtcccagctccaccaaatattagttgaatggcttcagacaagtcttttaacctctctattcctgaatttccccatctccaaaatgggatggtgatgattaaggtgaaagaaagatgcctggtttagcagcaagaacatagactttgggttcatagacctggatttaaagtctggccttgaggcaccgtggctcacgcctgtaatcccagcactttgggaagctgaggcacgcggatcacctgaggtcaggagtttgagaccagcctgaccagcatagcgaaaccccgtctctactaaaaatgaaaaaaaaaaaaaagccaggcgcggtggctcctgcctgtaatcccagccctttgggaggctgaggtgggtggatcatgaggtcaggagttcgagaccagcctggccaacatagtgaaaccctgtctctactaaaaaatacaaaaaaaaaaaaaatagctgggcgtggtggcaggcgccgtaatcccagctccttgggaggctgaggcaggagaattgcttgaacccaggaggcggaggttgtagtgaacccagatcgccccattgcactccagtctgggcaacagtgtgagattccgtctcaaaaagaaaaaaaaaaaaagcaaaaaaaattagctgggcatggtggcacatgcctgtagtcccagctacttgggaggctgaggcaggagaatagcttgaacccaggaggtggaggttgcagtgagccaagatcatgccactgcactccagcctgggcgacagagcgagactccatcttaaaaaaaaaaaagtctggggctgggcgcggtggctcatgcctgtagtcccagcattttgggaggccgaggcgggtggatcacaaggtcaagagatcgagaccatcttggccagtggcgcgtgcctgtagtcccagctactcgggaggctgaggcaggagaatcgcttgaacccgcgaggtagaggttgcggtgagctgagatgctacagcactccagcccggcagcagagcgagactccatctcaaaaaaaaaaaaagtctggccctgtcttcctagctttatctttgagcatatacataggactgtgtgtgcctaatctgtaggggtgtctgtgaagacagaaacagcctagctgctcatcaagtggatctgctattatgctatttttattatatggtgtatttgctacctcacagcgttctgaggattaaatgagaaaaacctcactttagaaaataggtaagaaagcagcagcctatcaacgatgatgctgtggctgtttttattactgccctgggcaaaggattctcttggagctctttgcctgttacagaggtgggaagaaaggccaaggagggagagggctgtgcagccaggctggagttgggtcagatgggggagatttaccactcagggtgctgtcaaatttgggtcacagactagtgaagggagggtggagaaagcaggagctgggctcagaaaagggctatttcccgcaaaatctgcttcccccacctaatgctgtggcaggggttagaaagggagactgcctggacgccctgcttggttgctgtggaagtgtgcgggagtctgttttttctttttgttttctccagcccatccttccggaaatcacgaatgtcccgtgcccagagcttccctgacaacagacaggaatactcaggtgagttccacagagcctgggtgggtaatgcagggtgtctgggtggggcctcaggtggctctgcttcgacttttctgagtcagtagctctccttgggcttgctgctttgaggtctcaggtgccttggggacttgggggcttaagtggctcacattgacctacccagaagccagtgattcccctgtcttactcagatcgggaaactcagctttatgacaaaggggtcaaaggtggaacctacccccggcgctaccacgtgtctgtgcaccacaaggactacagtgatggtgagttcttcttcacctgctccctgctggctgcctcaagaaaggacaagttgccatggggagggtgggttcgtccatgcagtgcctgtattttccttcattcctgaggatttgtggcccagacttgaggcatgggagacaggaaaaaaacaaaaacaaaaacagggaagatagtatttgtagaccagatgctgccactgggaactctgaccttgtttgaagccagtggtgtgctccaggggcaccatctctcccatgtcctcttctgccccacagcagcaggtggcctgggccctgtagaggggtaaggagtaggatacaaggaaatcagtgccttcgggtgtggcttggccttgcaagcaattgggagcctgttggccagccatacaccttccctttggccagatctccctgaaccagactacttcctaatttctgcttttgtcctgattcttggagtgcttgggacagcagcctctgtggaatgagtcaggtgggagtgcggacgggatgggctggagctggtattatctatcacttctggctgagacctggtttgtatattccgccttgtagcccggggtgtctcagacctggtttgtacgttccgcctcgtagcctggggtgtgacttgctctcctctggcccttgcaccctttcaggcagaagaacatttccccgaatacggcgtcatcaaggcaacttgttcaccctggtgccctccagccgctccctgagcacaaatggcgagaacatgggtctggctgtgcaatacctggacccccgtgggcgcctgcggagtgcggacagcgagaatgccctctctgtgcaggagaggaatgtgccaaccaagtgtgaggagctgtccctggctaggaggagactgcccaggtggtctcagacaagctacgggggcaaacagctgggcccctgggacccttaggctcagcaggtggtggctttggcccaaatgcaccacatgggataagccttggagtgtctgaagcctggctccactattgtgtgacaagcctcttctcctctctgatctttagtttttccatgtttaaactagggaagagcacacccttcatccctgccatattaagatatttaggggctttggaaggaaatgcatttgatcaatgcagaagagcatttaaccatgacttcagccaatcctctgcttcttaggactctgacttcaggtccgagtgactagggcactgggcttgctccagattgtggtggagatgctctactaagagatgatgggtgctgggtgagggggagcctgagccagagaccctgttcctggagaatgaatgggatattcataaataatgtacacaaagtaactctttccttctgctctcctgtagctcccagtgcccccatcaactggcgccggggaaagctcctgggccagggtgccttcggcagggtctatttgtgctatgacgtggacacgggacgtgaacttgcttccaagcaggtccaatttgatccagacagtcctgagacaagcaaggtacacttaacccgtggtctgacttcagttccctcctttcaacaaaaatgcctgtcttaccacacagagtagttgcctgagatgctgtaggttgcttcctctgtcattcttcccaaactccctttctgtccatcctggtcccagccacagggtgaaaggactgtggtctgaagagcaccaagcacctggaggggagggattgggtgtaaggaactaagctgatgccaaagtaccaagtaacccaaactgagaggtgatgacctgtgacacagaggggactccctcccctagacaagtatctctccccagctctcagcccaggaaggagctgtggggctccttcacttggtccagctctagaggaggaatcatatggcctgtctttgcagttcagctttcaacgtcgcttatacttcaagttctgtggacaaacagcagttaccttaactaagcacccacggccccttctcccacctccctgcctccttccacccatgggagtgccaccatcccaaggcctgcccagcattgtggccaagagctagacagttaagagagtcccccttttctccaactgcagttcccaaggcagatccctgtgaggccactaactagggcaagctgagctgaacccaggcgggcagaactagggccctgagagctgaggcgaccactgacccctcccctaggaggtgagtgctctggagtgcgagatccagttgctaaagaacttgcagcatgagcgcatcgtgcagtactatggctgtctgcgggaccgcgctgagaagaccctgaccatcttcatggagtacatgccaggggtacgtgccccttgaatgcatgtgagacacacacaaaagagggcctgacctgggggctggggcctgcaggaggggggtcaccttggataggagtttgaacacctgaggctccagaggcccagaggagcaaagtgaggtgatggtgggacttggagtcaggagggccctgcctcaggttgcagtgggagtatgagatgacagctgtcctaggtccagcactcccctgaggcatgcagggctggcccactgtccagtaaatgcagccttcatctggagcagagaggcctccctgctcctggatttgggtggcgctctgcttgagaaggacttggggtactctcttttccaaactgcctgacagctcctggcaaaatgccctgcccagccagataggaattgaacaaatcactcctttgctgccatgctgggggctggaatgggcttgcccctccaccagccctcccctgaggggactcctctgacttcttgtggcctccagggctcggtgaaagaccagttgaaggcttacggtgctctgacagagagcgtgacccgaaagtacacgcggcagatcctggagggcatgtcctacctgcacagcaacatgattgttcaccgggacattaagggtgagcagggccaggatacatggagtccccaggacctgggttcaagtctaccattgagtgcctgcaggggccaatcacttaaccattctgaactttctgaaaagtgggaccccagttgtttccctgaggaactggtgagattggttgagcaatatgagagaatattgccaagttccctctacatgtgggccttggagatggtcattttgtgcggtagatctgagactcccctttgctaaatcctttgccctttgcagttcatgtctaattcagtggtagccctgccctctccagcagctctcagtgacccgggggtggggaggatgggagaaaatgcaagagggtccagggttgcagcctctgccctttcatgcctcaggagccaacatcctccgagactctgctgggaatgtaaagctgggggactttggggccagcaaacgcctgcagacgatctgtatgtcggggacgggcatgcgctccgtcactggcacaccctactggatgagccctgaggtgatcagcggcgagggctatggaaggaaagcagacgtgtggtgagcactgggacatgcagaacccattcttccacccaggccatagtggccccccattagaaacacaccctggggactttgtggtgtggcaggagggagtgtgcccagggcccaggctgcagtgtgtgcaagggtattattgggtgcagtagcacacacaccacatgggtggtgctcaaagcacactccattagagctgggaacttaggccatggaaaacatccctcatgtttgctaaatctcttaaggaagcaggatccactctgaaggcctgaaggcctggaccagtctctcaacaggagcaggcttctgtcccttctcctagcactcaagacagtttgcacttgctcgacataaccttgtgtctatcctctgaaatggcccctaagtcaggagagcttctccccttggaaagctattgtggtgggctgaataatggcccccccaaagatgtccactgcctaatccctggatctgtaaatgtgattgtatatagcaaagggcctttgcagataggattaggttaagggttttgagatggatggattatcctggattaagggtccttacagaagggtctcaagaggtcagagtggctaataggaggtgagacaatgaaagcaagaggttggagtaatacaaggaggggaccatgagccacgaaatgcaggtggcctctagaacccaggaaaggcaaggaaacaggttctcccctcagagcctctgacaggaaccagccctgccgccaccttgactttagccctgtgagactgattttagacctctgaccttcagaactgtaagatgatacatttgtgttgttttcctgcctctaagtttgtggtcatttgttaagagcagctatgggtagctaatacagttattgtagagttctttctgtcaagtctaagtgattctctttttccttatttcaagaagtacccaggtgtgtggtgagtgtaggtccatgaagcccacgtggacagacatccaagctgaggtatccctcagcttggcctgtcctgcacctcagcttgctgtgagaaaggcgcctctttctgcagtggtgggcaggacagctgggagtccagggctggctgaggggtgacacggggttctctctttccaggagcctgggctgcactgtggtggagatgctgacagagaaaccaccgtgggcagagtatgaagctatggccgccatcttcaagattgccacccagcccaccaatcctcagctgccctcccacatctctgaacatggccgggacttcctgaggcgcatttttgtggaggctcgccagagaccttcagctgaggagctgctcacacaccactttgcacagctcatgtactgagctctcacggccacacagctgccggtcgccctttgctgcatggcagggggctgctgctgggctcagtgaagttgctgcttctcccaggcaaggctgtggaccatggagtggcagcccagccagcgtcggtctgtgccccttccgccactggggctcagagccggggtggggtggctgcagcctcaggactgggagcccccagcctgtcagatccaggagctccagtgtcctgagctcagcgtggaggggtaggggctgggaacagtgtgcaaggcagccgtgggccccaccctcggggatgtgtcctgacactgcaattggcaccgaagcccagagggtctgggggcacaagactgacgccagggtatgaagagtgttattttcattcaaagtgttattttgtttttccttccaatgtctggagaccaccagggcatctctgggctggatgagctcccacaagcctgagggaaaggccagcactcgctagcagtggcaggcagaggcccaggctgccgtcccctagagtcccaggttggctctgccagtcctgtcctttaccaaagatgaatgaagcaaatgtcatgctgccttattcagggaaggaggagcctgtcctgcctgtggccatgaccctgcctctcccaggcaggggcccgcgatgtggaactgctgccactgaggggggatccagttttgtcaatgcagttgtctctgttttacaagttggagtcactcttatgctgtacccagtttctaaactggagactgtgtgtgccctctgggctctgagtacccctgctttgggcttgggcctaggctgcattgaaaagagctgaaggttgtggcctttgcgctcctggcccagcctttgttccccactggagcagaaggggagatggacgacacggtcggggcatctggcctggccagtgccctgatcccagagagcccgaggaggtgtctcaggctgcctgagtcgtgacctgctaggccagagcccactccatctggtagaagggaaagcccatatgctaccaccagctgtgtccaaaaccgccagctctgttcttcctcagccagcctcgcccatccccttgaggtctcagcccctttcccttgtagctcctcccctggagggggaatggcagcaggggttggggaaacagcatctccaagcagcttagagttggccatatttacctcagcctgggcgctggtcctttcttccggcccctcccctccaaaatgtgcctattgctagagctcctccctctcaacacccagtttccttgggagttgtcattaaaggaaaaaaaaaaaaaaaaaagccagtgcccagggatgggcatctccagggagctggggattagtgccaggcagccctgccagccatgcctacatccccatgggcacagaacaagccaaagccttcgttgtatgttgacgatgcacttttatgaatgtagtttctatcgctgtttttagccttttcacatcatgtaatgtgaggccttgtacttgttaatttatatctcagatcatatttgatggtttttatatatatcaattctagactgttacaggtgacggacgcctcaagagagagaagagaaaatgaaagcagctggttttgcagaagtgtgtgtcgcatgcgccagttgggcctggaccctcctgtgtccatccctgttcccccaggggctctatcagcccctgtaccccacactgccctctgaagacaacacaggctcctgcttccacctcggcccttgcccagggtggggcctggccctcatcttgaccaaagctgctgtgtggcagctcggcctctctacgaccccatcttggtggctgcacactcttcctggcccgcacccccatccccagtccctgttccccaagaggatacagagcacggtgctggctgactcaactgtgcgtcccaggttcagggtcttacagagctccaccccctggggtcttacctcactgggaatgtgttttgaaaatgaatttgaagacaagccaacaaaccctgcactccaaaaaagcaaaacagaccctaatttttttgtgccaaaaactgtggacatgctggctcagcatcctcaggaccaagttgttgcttaatttattgttttttaataactaatccagataaaaagttgtggggcttcagggtgacctgggcccaaaggttctgaagggcagttcctggcagccccaggcttgctgtgggaaggggccgtgccgtcactttctcatcattccatggggtgtgtctgcctgggccaactctgcatggagaggccagggctggggacagtccgcactctgccaccctcctgccccttccacccaccccagctctatgtctgtgtctgaattgtggatcgtgcagccatggttattgtggaactgtggaacctgcagccatagttatttgactatatcttgaccgagggcttgcagtgcaaagccaggccagtgttgcgcattacttacaataaaagggatcatttatatcagaggggtcctgtggcagtgctttcagttgtggggggtggaggtaggtttttgcttagcaggggccaggtatggtgcctggcaacgagcctgggcctttcaagcagaagagaacttgactccaagtagaggggtcctggggtgatctggctgataccattgtcagtccagaggtgtctgcccctttcctccagttgcccctccaggagctccactggggtggtcccaacagggctgatttaccagggtggcactgctggccctcacaacctgaacgtcaccagtggctgagttcccggagctttcatgatatttggtagggtcttcctggcccagaggacttccttcagtcccatctttgcagggcaggggtcaggtgtctccaagagccacctctccagtacccccttgtggtcatctgctactgttgcttaaccgaaccaagatgatccttgccatctgagacctctggtgcaggaagttggcctgccctgagaggctctgaggcgctcacttcacacttgggaggatccaggccggggcaccatctctgctgagtattcgctctgctccctcgaggagcagtgcctgcctcagcatagtgacttatgtgacactggagcctgtggcccagctccctgccctgttccacggggaggccacttaggaactcaggcagttgtatggtgtggtggcagcaaaccctccaggagtctctgttctcatcgatcccatgtctggagacatcaggaagttgaatctggagcaggacaacccagacttctgcctgtgtcccaccggggcgccctcaggtcctcccaacttgcctggtttgctctgctgtgaactcatccctcattgtccctgggttttcagagaagcagaggtagtttctctttggatttcctgagacagtagctgtgactgcacctccgcagagcttgaaaaggcaaggggatgatgacagcagcgaggggtaatgatgaggggggacaatccaggggtcactaaaaccttgggcagcacttgctgggtctgctggttaccgccattcttcgctaacttacttccaggtcaaagggctgggaagaagggagggagctagacagctggaaccagccagggaacgcggcagcttgcaccccaggcactgaagtgcagcgaggacaggcgccatcacccactggcagcctggccctcccgctctcaggcctcttcacaatggggtgcatatggtaagttggtgggtctgaaccaacccagaactgaggggtgaggtggagtttcagttccaaaaccactgtgggtgtgacagcatgaagccctcgctgtgaagaggagccctcccatttctcaatggtgtgtcagggaactgacacccacttctagctccctgcccccatcagggccgaggtagtcggggctggccctgtccccccatgcccgccccatggtgagtctgcacccttcctgtgacagatcccccagcaggccacacaatagagaatctggatctattgaaacatgtttaaaacggggttggtcacaacaggatgggcacaaatgggagcgggggaggggagtggggccgcaccagcccctgccagtgcctgaggctgcagcctggcgagtgcttttgcttctgcttctccacgctggtggttcgagatggtcccaagccccactggggcaggccctgccttgccctgcagaggcagggtggctccacttccccatctcctcccccatgggctgcaggggcatttatgatgcccaacaggtggcactgtcgcgctccttcctccctgtctccgtggctcagaaacaggttaagggtagaggtagatggggagacgtgggggccacacagtctccggtggcagtgagggagcttgggaccctgaggggggcatgctgactccttgctggagaaaaggcacctagataggggagctgggcttgggggcctcccagggggtcctggggtgaggtggggagggaggctgaacgaagcaggaagcagggtggtgggcagaccccaatcctggtttccaaaccctcaccggctgcgggagaaggaagaaggaaggagtcctggagcagagccctgccctggtcccctacgcctgagcaagcctcatccccttcccacctggcccccacgcaagcccagctcgacctccttcccaccttccccctgccggctccaggccttccgcagagggggtggaaggttacagaggcctcaggccgtcttggtgccggggtccacctccttgtgggcccagagctccttgtgctgcttgcggccaaacccctcgtcgtagttgcctttgctcttaaacagctgctggaagtggggtttgcagtagaactccccgtgcagcgcggcgtagctgcccaggctgcagaagccaaacaacggcgtcaggtcaggtcaggtcggggctgggttggcaggcgaggcgggggcgggcagggcaggggcgcacctgagcttggtgtgacagtgcttgcagcagaagcaagagttgtggaaaatgagcttgtcggccaccagccgctccatggggtacacggtcttctggcaggcggcgcaggtctccttcacctgggcccgcaggctgaaggactgtgcgggaagctcagccaggtgctgccccagtgctcatcccgctccctcacacccctcctcccgcacacccggccccaggcccctaccttggagcgctgcaccgtgctgctgccgccgcctttggcgtcctgagggagaggggcggtcagggcaggggcagctccgggaggccctggatcagggctgcagccatcagcccaaggcccaggggcgcgccgcagggcacaaagggggccggcaaactctgatgcctctccccttcaccccaggccaggctcctgtccggggggccctcccacccagccgggcacttacatgagagggggtggcctgggcggctcctgcagcctggaacatggctcgttggaggtggaagcctcgggtggagaagcggcacccgctgggttctgcaaggggaagtcagtcgggagggccccgccagcccggccccagcctgcagggtggggggtgttgacaggcaggggctggggggattgcggttgggactttccctaagtcatttcctgttgctcttggtcttgccacttccgcccctcacccacctcccccacccctgctccccaggggccggggtcccgagtggcaccgtccctcggaagaacaaagttagcgggagcggaggggccgggggctcccgcgcagccgccgtgtgcgtcccgcgggctgggaccgcttggggtgaggggaggtcggggccggcggggccgcgatgagaagccgctgccccgacctgaccccggccctcgctgccctgcgccgcgcccgggcgtccaggcctaggctgcgcagcccctggacagcgcccgaggtccccgcccgccccgcccctcggcccccgacctggccccgcgaggaccggaccccagaccccgacgccgcgagccccgccagcgggtctcggctccgcccagccgggggccggccctgaaacgaggactcgagcctgtgcgccccgggcgagagcggctcgcagactcgccgggaccccacgggcggccctcaccccacacccctcggcgcctctcccggttccggagccggacgcggcccctccccccgcggctctcaccaggcccggcctgggccgcggggcgggatcggtctccgggggcgcacgggtacgaggagggcgcgggcgcgagctgctgccgctaccagtggtccccgagccaccgccgccgccaccgccttatcgctgcaccgcccccgccggcccccgccccgcgcccgcccattggctccgccgcgcccggagccgccttcggggccccggcgccgccgccgacccccctccgcgctttgtcttcccctcgccgccgtccccgcctttgtctgtcccccgccccggctccgcgctcccggctccgcagcgccccgcgggcctcgcgctcgcaggcctcgggtaccggccgcgccgtctgcccatcccgacggcggcccggcgtggggaagcaacggtggcagggacaggatggaagggccgcgctccgcatcctactgggaggggacgagttcaggctgcggcggctgcggtcgcgggacactgggcgctcccggcctggctccgggataaccgggcggggcctgggccattcactgcctcggtttcccccggttggcctcgcgcgtaggcgccggcgcccccatccccgcccagagctgtggggccgcagagacccagccggggcgaccccggagcctggcccggggtccctcgggcggccgagtcctcccgccgccaggggccgcccccgcccctttgcggcccacgaggctggcggcggcgtccgggcacgcggtctccaggcccggccgcgaggctgcggggaggagcctgcacgagggcccggcagccccggcagcccccccagccctcggcgcctctgcaaccctgcgacgggctggggaggccggtatgcgtggttcccggagcacccgtcccccgaggctccacgtactcaagcgtttctggggcggaattctgtgggcagcaacgggggccccctctccaacaagcgcacctcatttctcacgtgggagccgcggcccagagagctgaggtgacagagcttgggccgcagagctgctccctccctgcagccgcacagcaggccggaggcacagccggcgagagacggccactcgctttggagcggcggcgaggccggcgccttcccgggcaccagggactgcgtggcttggccggaaatcaggctagaagcagctccgggaagcacagcccttagcccagcgccttcccacactgtggcaggaatagcactggcggcccacgcgcttgtcagggaacagaacagctctcgcccgacgcctggcaggggagcagggaggctgcagcttccccagcgaccagctgtttcccaggctggcggactccacggaccggctccgcgtctcctctccagccttctgttctctctagaggaagatctgcgttttgtctgcactgtgggccgactctctagtggggagcgtcagaccctctaaagtggctgcctctcgggaaagcttccacacctgtcatcagattctccaaaggggctgtttgatgcaagaaacgggaagccccgggggtactaggagcagggcttgctgccattgggcatggtgaggccccggcaccctgcccaggacgggcctgtgggctgagctgcagatgggcattgaggatgccccaacagcaaggtgcagaaggcatccagaagcaaaggaaactgatgaccagcgtcaaaaacaaacaaaaaaagggaacttggctcggcggtggctcacgcctgtagtcccagcactttgggaggcagagacaggtggatcacgaggtcagaagtccaagaccagcctggccaacatggtgaaatcccgtctctactaaaaatacaaaaattatccaggcgtggtggtgtgtgcctgtaatcctagctactcgggaggctgaggcagaagaatcgcttgaacccgggaggtggagcctacagtgagtcaacatgaagccagtgcacgccagcctgggcgacagactctgtgtttgtgtgtgtgtgggggggggagggcggggcgaggcgaagggaacttgaggtttaaagcagggggaggagggccggaaatgctccccgccgcccccgacactcactcgccccaggccccatcctagcccagggtcagtgtcattcccttcaccttagcctctcactgcccaaagaggcttacttttcttctttaaactgctgttaaaatttgggaggaaacggaaagcaagggcacctgatggttcagtgcagcttcaggttagaggggcatttgaggtgcctgagctgggggagggccttccccctgagggactgggagaagggtaagccatgtgccctggaagcactgcagggagcctcagatttgcaccccctggctcacactcgctggcgccagccagcatggcagggatgggcggggctggttcttaggtttcctgctctttgggtgctagcacccagggtaaggagacacccatgtccggttgcaagacaaacccttctacctcctttcctgccaaaggccaccagcatcctctgcctcaatctcaatctttggaactttttagctccaaagtggtttgatgaccacaggctaaaattcatagtcttaaaattttagatagttaagagacagatctgttacaggttttcaaataaactggtctatctagtgtaagaggtcactgctgagcttcagtgagcacccatgggcctgctcttggatggtgggacagctctcacctggggcagcacggccatccctgcaagcacacacaccaggaagcagcctgtagcccctgagctgacgcagacacaatgccattctccagcagcgtctctgaaaattttaatttgttctgacaacgaaactaacacagcataaggacttaagccctcaagctaggcaagacactgatggcccttggagaaagcaccagggcagctggcaggaggcgctaagatggattcttggtgggaaaggaatgaggcacacacataaaccgtgggaaagacttaggtgtcagggcccaagccagaagagggataaggatggactgttccagccttagtctgtgcttaaaaagacagaaatgcccttctctggaattatgagggagaggtctgagggaagggaggcaggcagcttactacttgccctttcactgacctatagcatctgaggcatctgagagcaaagttaaatagaatgaggctggtcgcaagcactgggaagaggtggcggtcctcgggtttaaggagccaaaccctgggcttggaattcagctcccagggccagagcagcatctctcttctgcggaggaggtcacctgagctcacaggactgggaatgtcggctttggaccctcctgatccctggttgttgagattcccttgtgtctcaaaagccttggagcagtgaagtgtctctccaggattttctttcccaatcagtcagcagtcaactttcctggaagaatgtcctttctacccaatctgcccaggagggcgggaatgtggccggccctcaggaagggcctctgggtggcctctgcatccctggctggagaatgcgcacagtttgcagaggctcagaactcccaatcgtccacctccagctcttccaggtttgttaccaggccaaagattccactgtggtcctgagactggctgccctcaaaattggtgatgggggtgacaggacgaagcaattcgggcaaagcctctgaggcacgtcgcttgatctgggggagaagagagaggtgggtgacagatcctgttgctctgggtcccaggacaccatggggcaaggaaccatggcctggtggcagacgggctgtcggagccaactccatgagaggaaggagcagtgtctttcaggggcttcggaagcggggtagtttctctcattcaaagggaggggagagaaagctaaagggattgtgagttgttagaaccagaactagaaccagaaccagaacgaaggggctacgatacctgcttgaagaaagagtggttcaggagggtgctggcactgggcctggagggaaaggggaggagagaccgcagcatcactgccgtgtccccagcttcccgaaatcctgccacttatgcctcagcctcgggtcccctctccctctccctcagctcatgggaagcagtggccagagctccccaggctggcctctgacacacccaggagctgatccctcctgtgtgtagctccagattcccctgcagaacctttgggaggtaagtcccttcacaccctggccttaccctcctgagcaccctctgctctcccgaagcccaggcccaggccagcagggatacctggcatccgggttgcgctgaaggcactgctccacaaagtggtggaagtggggggagaaggttcggtggtaggggtgggagggcgagtcaccgttggagggccggggggtgctggtggtcaggctgtcactcaggccagagttggccactgagcgcgaagggctcatggtcagctcctcagcggggatggtgctggtatccaacaggcagggcactgtgccgttcagtttctctagcagcatctggggaggacagaaccaggacctgggctgtagcgggtggggggggggggtggtccctggaaggcctgagagtctcttcacaaatacactgttcccaatatgcaaatgtgatcatttgaagagtggaaaaggtggaagtggagtaagtccaattttcccaaagaaacgctggtcactggcgtggcagctccgccctagccaggccaacgtgaaaggagaggggttgcacaaaagtacccgctttcgccatggctggaaagcagggctcacagtttccgctctccctttccaaggcatcaaattccttttaccgtagagtcttcaccctagagggaaggagcagtcagatgaacctgctttgaagcccagccgtctgccatgctcaggtggatccgatgaggtctgagaggcagtccctgcagtgccacagcctgggctgtcgctgcagcaggccacacgggagcaagatgcccaaggggaggccaggctgggtggctgttccaaagtaccccaactcaacacatataaaaccagccccacctgggactgctgtcctcgtggaagtcctcatgaccgcataagctgtccaagccagaaacctggaaattgctctagagctgcactaacgtgatagccactagccacttgtggctatttcgatttaaatgaggtttaaaattcagtcccacagtctcactggtcaccttctaaatgctcgacagccacacagtctcatggctcccacgctagacagtgcagccacagaagccctccttcgctgcagcaaattctagtggatggtgctgcttctaggcctggacttcttgttcctcctcagtcaccttttctttcctgagcatcctctgtcactgaattattttactgagatctcctagattcctcacatagacttccatacccacctaactgagctactggatctaatccatctgccggggtggtctttgtaaatgagccatcttatgctgtcactcctgtgcttagaatcctcagcactgctccacaggctttaggacaggaaccagtgctctaaagtggcatcaaagcccttcacaatgtacccttgcttccttctgtgcctgtcacctggcagtccccaagaagcactgcaccttggccatttataccatttacacctccttgctgttctccagatctgttttttctagactctgggtctctgcacatgctgctgtctgccgagaagagtgtcctagttcctcctccacacaggtgactgctgtctgccttccaactcaaggctgcctcctcccaggacttccctgggcccctgctctggggggctgcactctggccaccctccagctgcccctaccaccgggcaagcagcctgtgggttccggaagtggcttaattagagcctgcatcctgcccctcccagttccagaccacactccaagtagctgggacccaggtaatccttgcccaaatgaccccaaatccattttctggatttaatgaggcttgcataagcctcttccctgggtctgttttcccaagggtagactgtgccactgactgtgcacccttggatcctaggggtggccaaaggacaggcatctggagggtcatgaacagaagctgaacttacagaatgggggttccaaaggtgtcagctggaatgcggttaagaactgtgggaattctaaattagaaactgaccttccaggtatatttatccaagtaggaggacagaacatattttatgcatttataaaaactagttagcttaatgtatatgttttaaatagacatgtagcgtgtgggcctccatttgcacccctgctcccgggctcccctccccaagctggcctcccttaccaccaggtttgccacaggaagtaaacaaagagtgaggtcactatcccccactgggtgggacttcttgaaggaaaagacagggtctttcatcttagtattcctagtctgtgtcctgagtgtgagagctactcaacgaacatctgtggaaggcaagcaggcaagaaggaaaccgatgggcggcaggcttacctgggtggcaggcatatccttaaaggggacatggccgttggccagttcacaggctgtgattcccacactgtagatgtcagacttggcatcataaccctggagattctaagccagaaaaaaaaggccacagattaccccatttggtctttgttcttagaaaaagggtagaactaaagagaggaaaaggatggctgtccccacatcaggacctgctgctaatgactctccttgcctgtgctactgaagactaactggtattttaccacctgtaactggcgatgctctgtaaggagcaggaagtgccagccccatgcccctgcttagcacagggatccagagagcagcaaacatttccaaaatgctcactcttctcatagggtgccaagggtccctaaagggagctgaaatttcatccaatagaggttaggaccccctgggaggaaccacatccatctgcagtggacaggcgctgcccacgctgagggctccctccctccaggaacccctttaccccactgggaggttgagagcccccgactccaggcaatgcctgaaggctcccttgggaatcatgagttgggtaggggagctcctctgggcccacacacagacctgctggaggacctcggggctgagccacggcagaaccttgacactgtacttgggaaaatcgtggaccactcgctgccgctgcccatggcttatcatgctgaggttgctgcgcaaaccagacaggtagaccttcccatccacagagatcaggatgtggctggctttgacactcctggggaagcggggagggtgtcatgtcgagagcaggagcccctcctgctacaaatttttggtcttcacacactccacctggccagctctctcctgtgtgcgtgtgttatacacgtatatgtgtattttacatatacataaccatgtttttgttttcattgagataagagtctcactctgtcacccggctagagtgcagtggctcaatctaggctcactgcaacctctgcctcctgggttcaagcaattcctgtgcctcagccaaccaagtagctgggattacaggtgtgcaccaccacacccagctaatttttttttttcttttttttttgagacggagtcttgctctgtcgcacagactggagtgtagtggcgccatctcggctcactgcaagctccgcctcccgggttcacaccattctcctgcctcagcctcccgagtagctgggactacaggcacccgccaccacgcccggctaatttttttttttttgtatttttagtggagacagggtttcactgtgttagccaggatggtctcgatctcccgacctcgtgatccacccgtctcagcctcccaaagtgctaggattaccagtgtgaaccactgcgctgggcccgcccaactaatttttatatttttagtagagatggggttttgccatgttggccatgccagtcttgaactcctggctttaaatgatccgcctgctttggcctcccaaagtgctgggattacaggtgtgaatcaccgtgaccggcctataaccaggttttttgttcttgttgttgttgttgttgagacagagtctcactctgtcgcccaggctggagtgcagtggcgcaatctcagttcactgcaacctctgcctcccaggttcaagcaattctcctgcctcagtctcctgagcagctgggactacaggctcatgccaccacatccagccagtttttgtatttttagtagagacagggtttcaccatgttagccaggctggtcttgaactcctgacctcaagagatccaccccttggcctcccaaagtgctgccactgcatccagctataactatgttttaatgaaaaacttcaaatctacataaaatagcatgactccatttacatatcaccagattaaaagcttatttagctctgtcatccaggctggagtgcaatggcacgatctcagctcactgcagcctccacctcccaggttcaagtgattatcttgcctcagcctcctgagtagctgggattacaggcacctgccaccatgcccggctaatttttgtatgtttagtagagacagggttttgcgatgttggccaggctggtctcgaactcctgacctcaggtgatccacccaccttggcctcccagagtgctgggactgttcagtgctcttgtatgctctagaacacctcttgccctacctcctacgaatgcttttaatctgtacttcttatctgtaggactcttgtaaagtgtacctaggggtactgtgttccgcatcccattcttcctttttcactcagggctgtagtttccagacacatctgtattgctagctgtgtacctttcatcttttcttctaattgtcaccttggttctgggaagagatctaacacttttactcatccatccttctggggacagacactcacactacccctaaccaacacacgtgtgaatggtgacatccaaacatgtcccctgatgggtctgcacgagggtttctttagggtgtacatccagaagtggcattgatggttctggttctgtgaccctgactggcagcaccgggcatcttccaccacctggacaggaggctccccgtccttgccacactgggactcgtccagcctcccaaccgctgccagtctcatgtgtataaggtgacatcttgtttttcatttgcttttctctgattgcgagatttgagtggctcttcctatgatgggtttgtcttggggtttcctcttttgtaaacttcatatctttggcccatttttcttgctttgctgtccatttcttgttgatttgcaagatttccctgttactaatctcctgtggtgacaaagctaatatcatctgctctgtcacttgtttcttaacctttttcatggtatcttgtattggatagaaatcttcttgatctaatcaaattcatcaatcttttgtcttatgttttgtgcttctaaaatgttgagaaattattacatgcctcaggtcacaaaaacattttctcacatttccttctatttaagtctacagtttcacattttacatagaagcctttaatccagctgcagtccttctctgtatgaggagttatgtaggggtccagttttaccattttccctactatgagctgatttcctgacactatctactaagctatctgtcttcgccctggtctctcagcataagactgactctggggcacagaaagaaggaggcagagagtggagtacaaaggtccacatcagatgttcctctcacacaacactcaagaccaagctgctcagcaaagagaaagtcagtggcttcagcactaacaggctaagtgaccatctcccaagtcagtggcaaggtcagaatccagatccttctctctttttttttttttttttttcagacaagagtctcactctgccacccaggctggagtgcagtggtgtgatctccagtcactgcaacctccgcctcccaggttcaagcgattctcctgcctcagcttgtagtcccagctactgggactacaagcatgtgccaccacacccggctaatttttgtatttttagtagagacagggtttcactatgttggccaggctggtctcaaactcctgaccttgtgatccacctgccttggcctcccaagcgctgtgattacaggcgtgagccatcgcgctgggccctgtttcttttcagagcaaagagatcttcagcaagaatccagatccttgattttaaactctggcttcattaacttcagtcaaacttcactttacctgaaggctcaggggcatagctacccactgtaatcatgggaaaggccgcctaagaacgcacctgtgtacatatcccatgtggtggatgtagtcgagggccttcagcaccccctgcaggatgtaagcaatcgccagctcattcatgccatccatgaagtgtgtacagatgagatcttttgcagaacctgcagaaaaggattgcatggaggcagtgaaaggtaatggaggaggaaaacacaggcaatctgacaacagagtcccaataacccctttctaccaagaaccctttcccactcaccgtatgccatgaatgatgtgacaacccacagctcattgtctgcaataaaagtggctcgatatggcacgatattgggatggttgaagagtttggagacatgcagctcgccctggaagcaatgatgaagctgaagtcagaaccaaatggcactgaaggatgccgctcaacacaaagatggcagcatggacaatagggggacctggcactttctgggtgttctcagagtcatgggaacagcctaagcaggtgcctgccaacataggaaaaacaaggccctgctgcctctgcagggacccagcactgctttgcctctgccagatagggaaactgccaacaacaaagggtgccagcacaccgactcagagatgatgaaggcaaactgttgactgaagacttctgaagttataagcttatctcaatttcaagggccaacgtatagaattcctctttaagataagaaaacaaaaaatattttgttgttgttatttgtagagacaaggtctcactgtgttgcccaggctggtctcaaactcctgggctcaagcagtccttctgcctcagcctcccaaagtgctaggattataggcgtgagccaccaagccactgcacctggccaaaaatgttttcttttttatttttttgagacagggtcttgctctgtcacccaggctggagtgcagtggtgtgatcccgtctcactgcagcctgaacttcccaggctcaagtcatcctcccacctcagcctcgctggtagctgcgaccacaggtggacgtcaacatacctagctaattttttatatttttttgtagagacagggttttgccatgttgcctaggcctgctttggcctcccaaagtgctgggattgcaggcgtgagccactgtgcccagcccaaaactatgtttctattataaaagaaaacatggccgggcatggtggctcacgcctgtaatcccagcactttgggaggcgaggcaggcagatcacttgagcccaagagttggagaccagcctgggcaacatggcgaaaccccatctatatgaaacatacaaaaaattagttgagcatggtggtgcatgcctttagtcccagctactcgggaagcttaagtggtagaatcacctgtgcctgagcagttgaggctgtggtgagctgtgattgcaccaccgcactccagcctgagcaacagagccagaccttgtctcaaataaagaaaaaaaaaagaaaaagaaaacacagttgatggaggagaaggccagctgagactggcttctgctccatcctcagacccaccaaactactatgaacagatgaacaggtcctagagcaccatcaggtaaccaccaattcagaaaaagttgtaaatgaaggaggggaggggctgcaactaactctactgaaggaaaactgccccaggccctgactctaagctggcatcaggaaaggagagtctaactcccaagcacttactagactcacagtctctctccgttttgttttgttttattttttgagccagggactcagtctgtcacccaggctggagtttggtagtgcaatctcaaactcccgggctcaagcaatctccctgccttgccctcccaaagtgttgggattacaggcatgagctaccatgcctgccccctctctcagtttaacgagagagtggctacttgcttctcgaatagaaaggaatgtcaggactgggcatagtggctcacacctgtaatcctagcattttgggagactgaggtgagttgattgctcgagctcaggagtttgagaccagcctgggcaagatggtgaaactctgtctctacaaaaaatacaaaaattagtcaggtgtggtgtgcctatagtcccagctacttggggggctgaggcaggagaatcatttgagcccaggaggttaaggctgcagtaagccgtggtcctgccactgtactccagccagggcaataaaatgagaccctgtctcgaaaaaaaagaggccagatgcggtggctcacatttgtaatcacagcactttgggagaccaaggcaggcagatcacctgaagtcaggagtttgagaccagcctggccaacatgaagaaaccccgtcttttctaaaaatacaaaagttagccgggcatggtggtgtgcgcctatagtcccagctactcgggaggctaaggcaggagaatcgcttgaacctgggaggtgggggttgcagtgagccgagatcgtgccactgcactccagcctgggtgacagagtgagaatccgtctcaaaaaaaaaaaaaaagaaaagaaaaagaaaggaacatcaggcaaacaggaggctgagagccagaagatggccactggtggcagggcaggcaccttgtgtctggaacaagatggcctgggtttgaatcctgcctctgccatgagcaagttacttagcttctttctaaataataaataaatgaataaaaaagccagaagggagtgtttggagaagaaaagggaaatataaattaggctgagcagcatttcagcccaatccttagtgccaaatggccaggattctccactgaaagcttccataacttccgaacgtttagtctcccttcatttctttgtaattccttgtaattcctatcagagccaagagcccaccctccctccatgtgacacactcatggtttattacctgcaagaatgttaccatctcattggaacaagcttctaggttaatcctccgtacagtcacgtactctcctgttggtttgtaccttgctagattcacagtcatcaggtcctcaaatcctttgcctaaaagaaaaagggaatgccatacgcaaggacaagaacaacaaaaggttttaagaaaattttcctttaaaaaagggacttgatttcaaaagaaacttaatgttaaatttttcactactgttacttttttttttttccttttcccagcagaatttaactgttatgttcatggctcacatttcttgatttttctctcatcagttccttctcagccaacctttctgactcactatggccaggacaccggaaacatggcagccacaaaggaaagatggcaaaagagcttctttcctggaagtttgatctcttcccatacttggcataaaaaaacagagaagacccacagaagcaagtctgtgcccatgaatcctcctaactagtggatggcctctgctgtacacacatctggggctgctgagaaagctgcagcagcccctggagcagaaagcaggagagtaaggacggcccctgcacatacctatcacagtgagcagctcgtaacaccctccctctggcagaaagctactcatgacctcctgtttagagaaggatgctattgactctgagctcgcatcattggtctaaaaaagaaaaagaaaaataggttagtagagaaaactgggggtgggatgggagtggggtgaaggtggtaattcagacccacgaggagactggcatctaaacacacacacaaatcccgactcagtgccagcactatttgaagagaaacaaaacactacattcagggtagtaatcagcactaatatcagagcaagtgttagggttgtctacaaatgaggagacaaggacctgttcccatcaaatgttaatctgcttgtcctttccaacaatcaatgcatttgctaaaagctatgaaattctcacttggagaagggatgtctagagaatgaaagcatgtttggaaaagagaagcaggtggagaggtaggggttctcatgaatttcctgatgcattaggatcctatttttaaggtcctcaccacaagatcccaaaaggtcaaacgctgaatcttgctctagggaaaatgtggccaggagtagccccctctttagcaaaccaagagcccgggccagtcattgcctgacatttccaagtgaagtgggagaaccctgatgccctgagctgcaggcaaggcacagagctgtcaggtctcaggcatcgtccaggcagctgacatggcctgctccctcgttcctgcccacgtgtgctgtgagtgaagctggagtccagccacttaggatgtgtcacaactctggcctctaaggtcctagaggaaggtgtccagccatgtctgagtttgtgcaaaacacacggcagaccaacagctcttctttcagcttaatggactgtttccttcttccacacctaaatttatgtgtatgatttagggactgtgactgcttttcttttagattctctttctttagatgcacatctaactgaaatggagaaacctgggccagctcatgtttcatgtgctgcactcataaacctgacctccaggcagaaaaagtcctttgtgaaagtatgagaggctcctgacccagcactacccagaagagcacgagctgagagtgttctgaaaaggcggtgcttgaacaactctttgggaagcggctctgcagaggaaaccataaagatgacggtgctctatacctgtaagatgaccagagtatactttccagagcacttccaaattgcacatgattcctccatagctcagtcaagtagccgggacagatcttatctccacttttcactaacaaaaacgagggccaaggagattatgtgacttgccaaaaatcaaaacgtgagtacatggcacaggacccaggcccaaaccagtgagattaatctaccaccctgttggctgacgtttcacgtgtatctggtttgtttgttgttttgttgctgttgtttttaagatatgggttatctctttgtcgctcaggctaaagtgcagtggtgagttcctggctcaccgtggcctcgaactcctgggctcaattgatcctcctgcctcagcctcccaagtagctgagattattggcaggagctgagattattggctgtatgtggtttcaaaacagttgatgctgctgatggggaaagaaaccctcaagtgggctctgtctccctcaccacttaccctggcaataagaggaacctagtcaagcaaaattaagccctgtcaccaaattccatttctaatttaatcaatttttaaatttctaagatttggccatattgttgtatttcactgtagttcgcccattttcactgctgtatcatatattcagcacatgaatatatctcagtttatccaattccaactttgatggctcatttgggttgtttttcagttctgctattatggactgtgctactataaacatgtttgaatatgtatcctgactaaagcttgtaattaggagtggctggaattgctagtgacagagcatatgaacaatcaactgtttgagacaatgccaaattattttccaaaatggttataccaatttacactcccaccagcaacgtacgtggttttttttttttttttttttagacggagtctcactctgtcaccaggctggagtgcagtggcacgatcttggctcaatgcaagctccgcctcctgggtccaagcaattctcctgcctcagcctcccaggtagctgggactataggtgtgagccaccatgcctggctaagttttgtatttttttgtagagatggggttttgccatgttgcccagctggtcttgaactcctgacctcaagtgacccacccagcttggcctcccaaagtgctaacattacaggcatgagccactgtgcccggccacatgtgttcttattaatttatcttttccccaacacttggtattttcagatttcttaatttttgccagtctcatggatttgatttacatttccctgattactaatgaagatgaggatcttttcatatatttatcagtcatgtgagcgttctccaaggtgaaaatgcctcttcctgtctcttgaccattttcctgttgtttcagtgcaggatttccccaaagtaggccccacggaactctgattctgccagttggatggaaaaagtttccatgtccagtgaagttaggaaatgcagcacactctctcatggaggatcacaaggtgtacgtccatattaaaggcactgagaaattctgtagtaagaaaacttactgtgtttaacccagcatttcccaaagagatctgtctagggaaccttttgtgcctaacatctgttaaattttgggaaagataattgggaaaggctgttttaaataaaacatatgctacaatgcaaagagcataggcttatgggccacatagaggcagaatttgaactcaggtctattactggttctgtgaccctgggcaagtcactctgatctcttgggatctccattatatcagcagctgaataatttccatctcatagtgttgtatctattagatgagataaaatatgttaagagcttagtgctacctggtgtataaaagacattcaatacatgtgaatcctattctcctcctccttctattgctctctactttttggtgactctcctgttgaacaaataaaatggaaaagagaaaatggaggaaacagaatcctaagcagagcttgatcagtaaagttgatttgatactggtttttatacttatctgtgttttctaatgctctcaaaataaattctaggatcattaaattttattttattttatttatttatttttgagacggagtctcactttgtcacccaggctggagtgcaatggcgtgatctcagctcactatagcctctgccttttgggtttaaacgattctcctgcctcagccttataagtagctgggactacaggtgcgaaccaccatgcccggctaagtttatttatttatttatttattttagacagactctcactctgttgcccaggctggagtgcagtagtgcgatctcagcttactgcaacctctgcctcctgggttcaagtgattctcctgcctcagcctcccaagtagctgggattacagatgcctgccaccacccctaatttctgtatttttagtagagacagggtttcaccatgttggccagattggtctcgaactcctgacttcaagtgatctacccgcctcagcctctcaaagtgctgggattacaggtgtgagccaccatgcccagctaatttttgtatttttagtagagacagggtttcaccatgttggccagactggccttgaactcctggacctcaagtgatcctcccaccttggcctctcaaagtgctgggattataggcgtgagccaccatgcctggcctaggatcactaaatttttaaaaattattattattattatttgagataggctctcaatatgtcacccaggctggagtgcagtggcaagatgatggctcactgcaacctcaatctcccaggctcaagcagtcctctcaagtggctaagactacaggcatgtgccaccacgcctagctaatttttgtattttttgtagagatgaggtctccctatgttgctcaggctggtctcaaactcctgggctcaagcgattctcttgcctcggcctcccaaagtactgggattacaggcttgagccactgcaccctgctgactctagctttttgaaacgatctcatcttcagaatcatcttaagatgttaagatactggttaccacatgccaggtacctcaccaaggtgagagagatacacaaccaggaggcaaaaatggagcagcaatttgagcaaaaagcctcaagcaagagttctgaaatgacaactctccatcggtttagaattcacaacgctcatttggtcttgaagtgtctcattttctcaaccttatatacgcctaactcctgcacatattcttgctctgcagattctgttttcttaagtattaatctattccttaataaaatcaatgttaacagttaatagaaagctcagtgggttgctttcagacccaaactccccaccccagcctatgagtatacaaatgatttggcccttgcctacctctgtgatctcattccacaccacgctcgcctgacttgaacaatattcccacataaacaagtgtgttccagtctcaggaaacttgcactaactgtccctttggaaccctcctagcctcctccttcccttgaccctgctatttttctcatggctacctcctcaacatcactgatgtctcaacttaaatgtccttttcagagagactgcccagccaaagtaaactaggctcctggtcacgttatcagacagccttgctttcctttcttcacagaagttaccattgcagcttatttctctaaaatcttccactaaagtttcttccattaaaatgcaagcaccagaaaggcagggaccttgtctgtcatgttcactgatgtattcccccagtgcctggaacaccgctggcaaatgcttaaaaaatgaaaatgatttaagcaaagtttgaactgaggctttctgcccatgatcttttcattcccacgggctaaagaagagaataggtcaatgcagccagttcctttggtaacgggttcagcatgatgacctatgctggaaatgccagcctcataatgacacagtcgttagattcctgtgttactcagaacactctatagaccagaatctgattcctgcatgtgagaaagtactgcatttttcagtaggtaacaatatggcctcaatgagaggcaactactttgtatctgaaggtcttcgtgcatctgctctctaagcaaactccttaaaatttctctcacttgaaaaagagactatgaaagacagctgagtcctgagattcaaatattcattttatgtactttaaataactccctttggagaaaccacagatagatactactttttttttttttttgagacagagtctcgctctatcgcccaggctggagtgcaatggcgcgatctcggctcactgcaacctccacctcccaggttcaagtgattctcctgccccagcctcctgggtagctgggattacaggtgcgtgctaccatgcccggctaatttttgcatttttagtagagatggggtttcattgtgttggccaggctggtttcaaactcctgacctcaggtgatgcgcgcacctcggcctcccaaagtgctggggttacaggcgtgagccatggcgcccggcagatagatacttcattacctatgtccctcttccttgtcaggcgtgcatataagcttataagacatattgtctactaggctatacactaagacacattcttgctaagcctaggtagggaatgattcattaaactatcaatgtgcttagttagtaacttgacaatatttatttctactctccagtattacagaaaactaccaaaactaacccaaaagtattagttttagaaaataaaattctttttcttttttttttttgagacagggtctcactctgtcacccaggctggagtacagtggcatgatcatagttcactacagcctcgaactccagggctcaagcggatcctcccacctcagcctcccaggtatatgccaccatgccaagctaattttttttttttttaattagggacagagtctcactctgtctcccaagctggagtgcaatggcgctatcctagctcactgcagccttgaactcctgggcttaagggatttttctgcctcatcttcctgggtagctaggactaccagtgtgcgctaccatgcctggctagtttttttgtttttagagatggggtctcactatgttgcccaggctggcttcaaattcctggcctcaagtcatcctcctgcctcagcctcccaaagtgctgggtttacaggtgtgagccaccacacctggcctttagaaaataaagttctgggggctgggcgaggtggctcacacctgtaatcccagcactttggaaggccgaggcaggcggatcacaaggtcaggagattgagaccatcctggccaacacagtgaaaccctgtctctactaaaactacaaaaaattagctgggcatggcagcgggcacctgcagtcccagctactcgggaggctgaggcaggagaatgccgtgaacccggggaggcagagcttgcagtgagctgagatcgcgccactgcactccagcctgggcgacagagcgagactgtttaaaaaaaaaaaaaaaaaaagtaaaaaaagaaaataaagttcttggccaggcatggtggctcacgcctgtaatcccagcactttgggaggctgagacaggtggatcatctgaggtcaggagttcgagtccagcctgaccaacatggtgaaaccctgtctctactgaatacaaaaaattagctgggtgtggtggcacatgtctgtaatcccagctacttgggaggctgaggaaggagaatcgcttgaacccaggtggcagacgttgcagtgagctgagattgcaccattgcactccagcctgggcaacaaaagtgaagctccggctgggcgtggtggctcacgcctgtaatcccagcactttggaaggccgaggcaggcggatcacaaggtcaagagaacgagaccatcctggacaacatggtgaaactccgtctctattaaaagtataaaaattagctgggcgtggtggcgggtgcctgtagtcccagctactcgggaggctgaggcaggagaatcgcttgaacccgagaggtggaggttgcagtgagccgagatcatgccattgcactccagcctgggtgacagagtgagacaccgtctcaagaaaaaataaaataaaaaaaaataaagtgaagctccatctcaaaaaaaaaaaaaaaagttcttgactgggcacggtggctcacgcctgtaataccaggactttgggaggctgagtagggtagatcacttgaggtcaggggttcgagaccagccaacatagtgaaaccctgtctctactaaaaatataaaaattagctgggtgtgatggcacaggcctgtaatcccagctactcgggaggttgaggcaggagaattgcttgaacccaggaggcagaggttgcagtaagccgagatcgcaccactgcactccagcctgggcaacagagtgagattcggtctcaaaaaaaaaaaaaagaaagaaagaaaataaagttctttatgaaactggcaatatgagctcacaggcaatctggaattgcataaaatgaactagtccagtgatagcaactgctctgtccccagcttactaggaatgattctaaaatggaggccttctactttgtggatattgtataggtccgaactcaaagagagaccaaacttcatttaggaaaacaaacaaacaaacaaggaaacaggcaatattttgaaaggaagaagtctagatcatctgacattgccacaagaaacgcaggttagttcatcacactgtttcagttttagaacaggtctaaactcagataaaaagaatgaactatttagcccattctctttaaatgcagcatggcatagtttaattagtgcaatgtaataatctccaattgctcatagaaaggaactaattctgtcaaagtgttttcttagtttcccccaccatgaaatgcattttattcattttgaagcatctgaaaaataaataagcagctgatatccagaaatgaccataaaataactgtgtttaaagagtttaaaacaaaatacagtaaagcacacaaagacaatattcacaaaatgctaccaaataaacacattcaacttcccacaggtttcacacaggataacttttgatataacatcagcagctgtaaaaatataaaaatcctatgtaattggcatcgtattctagaaaaatagctaactgagcctatagggaacgtttttggtcttcagattggaaagcatttggatctgatagagaggtgctcctgattagcagatgacataagcacagccaaagctttactcagaaattcccagtcaacatcactgtccttcactcaaccttagggctgctgcagaagctgcaaatgtctgcaatctgaacagagtcagaagtctaggtaggaaaggttcttatcctctctccttataagacactgattcatatattccaaaatagcttggtacactgtgcacatctggtgctatttatttaagtaaaataaactagaagagaaggaaacagggtaagaatcttgcagctttcaccaatgaaaaaagtaaatgttctgttttatactttttaattttgcttttgttttttaaggtaagagatttgaggtcctgtcttattatctaggcagagatctgtattatctctgtggactaaaatctattattaataaactaaggacggaaaatttaataacattagtcactaaacaataaccgtatttctgactgttgaaacttacttttttgggggaaggggtggcagtcgattggcagggctggggagaggaggagaccttaatccccagaagagacaaaaactacctgagacttttttcagttttcaaactacacatccaaatttttccagggtgaaacctgaatctccacaagtacaaaaatcacactacaaataaagctcagtgacagataagcagaaacataaaatgataagccaacaaaacacacaaacttccacaagaagtcatctccatgcaacagccatagtgctagggcctaggaagccacttacttttctccgagtgtcacccggaggctgctctggggtagagaaattgattgttggcattttgtgttttagcagaagacacacccacattcagaacagcaattattgtacttaggactacatttattaatagaaaccacttaaaagtcattacagcaaaaagtgcctgcggggctacatataaacacacacagatccacagtaaaaatgctgcagagagatagggctttaaacatggatctatggttcttcaaaaggtggcaaggctactactctatgggtattctttactggatagaactcaactcttacatttctggtcatacatttacttggcatcaacacacaatgttattatgaataggccagttccttatattttgtgaataaacaattgattatatagttacagagatggttggccatttcccagtgagtgtgggaactagaaaacatgttttttcaaaaaagggcaaaaagttttaaaatagcaacacgtgtatgaaggaccattacccaacctgattctctaaagtcagatatatttgattctaaatgtaaataaagcaaaggcattttggcgctctgcttgtcctagtgaaaatgaacaaaacaaaggacaactgaaataactttctgttcttaagccaaattctgtatgtgcttttgaccttctctattctgtaaaagtgataaaaatcaccaaactgaagatttttaactgtaaaatattggggtgattatacatttctaattatcttaaattatacaattctaaataccttaaactacaaaatcagaaaagtctagttaccaaggaaaatgctttcttctttttaattttttttttaattttttattttttggaggcagagtcttgctttatcccctaggctggagtgcagtggtgtgatcctggctcactgcaacctccgcctcccgggttcaagcgattctcctgcctcagcctcccaagtagctgggattacaggtgcctgccaccacgcctggctaatttttatgtttttagtagagatggggttttgccatgttggccaggctggtctccaactcctgacctcaggtgatctgcctgcctcagtcttccaaaatgctgggattacaggtgtgagccactgcgcctggcctacctttttttttttttgagacggagtctccctctgtcgcccaggctggagtgcagtggcacgatcttggcaattctcctgcctcagcctcctgagtagctgggattacaggcgtgcgccaccatgctgactatcttttttttgtctttttagcagagatggggttttcaccatattgccaggctggtcttgaactcccgaccttgtgatctgcccacctcggcctcccaaagtgctgggattccatgcatgagccaccgtgcccagcctcattgtttactttgaaaccattttattcccattaatgatgggaagaaaatgagaataggaacagaatgtggtatttttgttccactatcctttcctttactgtgcatctaactaattctttccaactaaaatataaagaactcatcattattctaaactcccatttatctaaaacataatactttgacaaagttcacagatatcactagtccagaaattctttgagatgtgttagggaaaataataggtaccacctagtaactaacaagtttgagttttcaattacttaaacctatccctgaccttgtgatccgcccgcctgggcctcccaaagtgaaaccctgtctctactaaaaatacaaaaaaaatttagccgggcatggtggtgtgatcctgtaatcccagctactcaggagggctgaggcaggagaatctcttgaacccgggaggcggagtttgcagtgagccgagatcgtgccactgcactccagcttgagcgacagagcgagactctgtctcaaaacaaaacaacaacaaaataaaacaagaccaaaaaaacctatctgggcgtattttggatcagctaaccaatgtactcaatctgataatctgttttttaaatttccttcttattttattttttgagacggagtctcaaaaactcagccttgctctgtcgcccaggctggagtgcaatggcgtgatcttggctcactgcaacctccacctcgcgagttcaagccattctcctgcttcagtctccctagcagctgggaccacaggtgtgcatcaccatgcccggctaatttttgtatttttagtagagatgtggtttcaccacgttggccagcctggtcttgaactcctgacctcaggtgatccgcctgcctcggcctcccaaagtgctgggattacaggcgtgagccaccgtgcccggccgataatctgtttctttctttccttttttttttctttgagacggagtctagctctgtttcccaggctggagtgcagtggcgcgatctccgctcattgcaagctccgcctcctgggttcacgccattctcctgtctcagcctctggagtagctgggattacaggcacccaccaccacgcccggctaatttttttgtatttttagtagagacggagtttcaccatgttagccaagatggtctcgatctcctgatctcgtaatctgcccacctcggcctcccaatgtgctgggattacaggcgtgagccaccatacccggccggtaatctgtttcttaaactataggatcctaaaagagtatcttagaattcagacacaaagaatggggctctactattatttttattgaaaataatttttgttgccctaaattaagatgacagttcccaaaaaggctcactttgaaaatggccaaagggtaatgcctaggcctgtcaaagtttacttctgaaatcaacagtcaggttttacaataggaagttcatatttttgttctgaaagatttttccttagttctcttaaatctcataatttctaccatgaaaaaatgagtcaactagattcatcaataaaaccagaactttcatatcattgcttcctttgtcttgacaattattttttaaatcaaggctacagacttttaaatagttttcttcctttaaaaatatgtatttcacctggacaaaagaaaacatatatgcttttaagtaaatactggctttctaacaatcaagacaggccaaggaaaattgccatgttagtcttcaaatctttgggaaaccataaattcaaaaaggaaccaaagaaatccaacaactgtaggttacacttgcccttagaattgccaattgctatagattgatttagtcaacaaaaaagtagtgatttttatatcctgaagtgatggctaaatgccatactgtacttacctccaaatagttccaaatctcttaagccctcaacaatgaacttttccgagacccaccgctaaagaggaaaaccccaaagagaattagtatttcttccaagccgcaacaaattagctatcagcctttagacagacaaacaaaatcccaactatgaaaacagaatcatgcagtacagttaggaatcatttctatggaaaagtttttaacagaatcttgaactaaaaacaagattcctttctccactcctctttgcctatttgatgaataattcttaaatttgacagatgagaaatagatagtactggctgtaataatgaagactgtttttgccttccctatattggttccatcttactcgttctacattacagatgccttggatcactgatgtcaatttgaaaactattactggaattcataacacagaaaacagagatgaaacagtagttattcacaagaccctgttagtttgtaaaatggcacacaacaagttgcatattctttatccactaggggttctaaagacatggctgcttacattttctgccaagttcacaagggccaaactagtaagaccaaactagcaggatcaatctatggctcactttactggcctatttcaaacgagtattagatttctgtcattctgatcagtggtttcgtttcacctgaattaggctacgttgaagcagacaaggagctcatatttaaaagcaatggaatcaagattgtatttcccttaaggactggtgttacactttggcttgggggcattctttccactgggcagagttcaggctatggagagattccttttttcctcttaattaacagtgaagtttactctttctaatataaattgttcttatatgcataaacattagaaaaaagattaagtaacattcagaaataagttgcatgatacagactgtgaattggaactatagcatcttctgcccttacctataactattttttccaaatcaaaaaagaagtaatatcctaaattgaaaacttcataaaaattatatgcactgcatcaaaaaacataaattatgctttaatatgtaaagaaagtggtatactcataatatctcatagcacttatacactgttacaaaattctaaaataattacaactgcatttagaaattaggtacttgataataaagaaaataagaaactcatgaaataatgggaatttgtaaagaagctaaatctagtattgtttttgaaatcattttatctgacgaagttttgaagtataataaaatctttcatgttcaaaatgtcttcaattaaaactaatgatattacttagaaaaaagtgtcctagtaattacaacttgattttgaaaactcacaacctcacggggggtcataagcagttaaacgtctacacttaaaagtatcatcgactcatttaatgttgtatgactgatattcatgaaataagccactttcttcttatttcttctctatcagacaagctggtggtaaattttgtgtctctggtcagcctctgtctgcaaactcttctcaggagtggaggctgcactacctgccttacttcctacatccctcacttccgtatcattccgaccctcacgtagaaaaccacctacaacatctgccaaaatacactgcttttcagaaaacaaaaatagtaaagccagaagaatagaaaaacactcaccctgattcgctctggtttacttacaagaaatgacatgagttcctactgtgtaggcctacttcagtttcaaaaacttaaacctaaaaggaaaatagaaacaggttgagttagcaaaaatctccttatagagaaatatcttctgattaacaaaaacttattacaggtctaccattcaaagcactggacttcacctataaattgctagatttgtttagagaaactttaagtgatgataaatctgaatatactttggccaagtacattataaaattctgtaatttctggccagatgtggtggttcacgtctgtaatcccagcactttgggaggccgaggcgggcggatcacctgaggtcaggagttcgagaccagcctggccaacatggtgaaaccccatctctataaaaaaaaaaaaaaaaaaaaaaaaagccaggcaaggtggcagatggctgtaatcccacctacttaagaatcgtttgaacccaggagatggagattgcagtgagccaagatcacgccattgcattccagcctgggtgacagagtgagactgtctcaaaaaaaaaaaaaattttaattaattaatttctgtagaaagagaaatttgtcattatatggttttaaattaattcctaaatttctcttgacttaatcccccactaaccttttcccagaagcaattaccttcagttattttccatggttatcctgctttttatttatttacttcttatagagacagggtctctctatgtggcccaggctggtctggaactcctggactcaagcgatcctcccatcttggcctcccaaagtgtgggggttaccacgtgagccaccatgcacagtgttatcctgctttttaataattattcttaaacaatgtttatatgggtatgacttaattttagacttttaaaattttctttactgctccttgcagagcagggctaactcatagacaatgtacccagagtcagccagttttaacttcctactatggtagatgaagatgaagcttcttatagcatcatcttccactgtatctcctgctctcattctaccaacatagctctggcataatttggttaaatcaatagtccacatttatattattatgactatgcaaatatggttcagagctgaggcaaatagaaataactatgtctcagccaggcctggtggctcaagcctgtaatcccagcactttgggaggctgaggtgggtggatcacttgaggtcaggagttcgagactagcctgaccaacatggtaaaaccctgtctctactaaaaatacacaaaaaaattagccaggcatggtgacaggcacctatagtcccagctactcaggaggctgagaaagaagaattgcttgaacccaggaggcagaggttgcagtgagccaaggtcgcgccactgcactccagcctgggtgacagagctagactccatctcaaaacaaaccaaaaaaaacaacaaaaaaaaaaccatgtctcttttccttttcctttttttttttttgagatggagtttcactcttgttgcccaggctgaagtgcagttgcacgatcttgactcactgcaacctccgcctcccaggttcaagtgattctcctgccccagcctccagagtagctgggataacaggtgcctgccaccatgcctggctaatttttgtatttagtagagatggcgtttcaccatgttggccaggctagtctcgaactcctgacttcagatgatccacccgcctcggcctcccaaagtgctgggattataggcatgagccactgtgcccagacaatgtctctctttccttatacacctattttttcctagagttaataactgcctcatttgttcacttgcttggtttcccatatagctattattaactttttacaaacacgccaacatctctgctatttgccttatcaatgtatttttccataccctcaaacccatcaattagaattttctcctggaagttgccttcatagggccctccggtctcctgctacaatctggactaactgctttttaggccagttgcacttagttgacttttttttttttttttgaggcggggtctggctctgtcatccagtctggagtgcagtgatgtgatctctgctcactgcaacctctgcctccagggctccaaccatcctcccacctcagcctcctgagtagctggaactacaggtacatgccatcatgcctaatttttgtattttttgtagagacgggctttgcattgttgcccaggctggagtgtggtggcgcgatcctggctcactgcaacctctgcctcccaggttcaagtgattctctggcttcagcctcccgagttactgggactataggtacgcgcaccactacacctggctaatttttttgtatttttagtagagacagggtttcactatgttggccaggctggtctcgaacccttgatctcaggtgatccacccaccttaggctcccaaagtgttgggattacaggtgcgagccactgcgcctggtctcaagctcttgagctcaagcaattgtctgcctcagcctcccaaagtgctaggattacaggtgtgagccactgcgcctggccctaccctgatattctttttttttgagatggagtctcgctctgttgccaggctggagtgcagcggtgatcttggctcactgcaacctccgactcccaggttccagcgattctcctgcctcagcctcctgagtagctgggactacaggcgtgcgccaccacaccctgctaagttttgtatttttaatagagacggggttccaccatgttggccaggatggtctcgatctcctgacctcgtgatctgcccgcctcgggccttccaaagtgctgggattacaggcgtgactcactgcacctggccctgatattctttcctttttttttttttttttttttttctgagacggagtcttgccatgtcaccaggctggagtgcagtggcgtgatctcagctcactgcaacctccgcctcctgggttcaagtgattcccctgcctcagccaccccagtagctgggattacaggcatgcgctaccacacccagctaattttttgtatttttttagtagaggcggggtttcaccatgttggccaagatgatctcgatctcctgacctcgtgatccgtccgccttggcctcccaaagtgctgggattacaggcatgagccaccgcgcctggccggccctgatattcttatagaagctccttttccaaccccagctgagaatcactcatttatcttgtcacaaaattttaaaaatatagatttgaaaaaacatgattagaatgcatatttaatagtattaaacacaaagcatcatgcaaaagaaatttaagaggaaaaaaggtccatatcctcatgtagtctacaatagaaagagaaaattagtgtaaagaggcagatagatgtttttatctgcaaaaaaagtttctatggtctggaaaaattttggaatttaaaaataaaatcaaattttctttctttcttttgttttttatgagacagggtttcattctattgcccaggttagagtgcagtggcacaatctcggttcacagcaacctctgcttcccaggttcacgccattctcctgcctcagcctcctgagtagctgggactacaggcgcccgccaccacacccggctaattttttttttgtatttttagtagagacagggtttcaccatgttagccaggatggtctcgatctcctgaccttgtgatccacccgcctcggcctcccaaagtgccgggattacaggcgtgagccaccgcgcctggcctaattttttgtatttttagtagagacggggttttgccatgttgcccaggctagtctcaaactcctgagctaaggcagtccacccgcctcggcctcccaaagtgctaggattacaggtgtcagctaccgcacctggccaatagtggcatattaaaaaccattctttttttggagacagggtcttgctctgtcacctaggctggaaagcagtggtgtaaccacggctcactgcaacctcaacctcctgggctcaagcaatcctcctacctcagccttctgaatagctgggaccacaggtgtgagaagctgcctggctagttaaaaaaaaaaaaaaaattgcttgtgtaggccgggcgtggtggttcatgtctgtagtcccagcactttgggaggctgaggcagatggatttctggagctcaggagttcaagaccagtgtgggcaacatggcgaaagcccatctctacaaaaatataaaaattagccaggcatggtggcatgtgcctgtagtcccaactacttgggagggtgaggtgggaggataccttgaacctaggaggcagaggttgaagtgagccacgatcgcaccactgcactccagcctaggtaacagactatgttgtccaggctggtcttgaactcctgggctcaagtgattctcctaccttggcctcccaaagtggtgagactaacagtatgagccaccacacccagcctaaaaaccattttctttttggggaaggacagagtctcgtgctgttgcccaggctgcaatgcaatggtgtggtctcggctcactgcaacctccacctcccaggttcatgcgattctcctgcctcggcctcccaagtagctgggattacaggcacccgccaccacacccagctagtttttttgtatttttagtagagacagggttttaccatgttggccaggctaatcttaaactcctgacctcaggtgatccgcccacctcggccttccaactaaaaaccatttcctaagaagattttgggcctgccaatgggcacaagctagacacacttttgcaaagagataggatacccttctgttcaggtatgaatctttatcagactcctcaatgttcactactaaatgtttaagacatatgggtcatatataactgacaataaaacagcagtaatcctggtatttgtcagaatacaatcttttttttttatttccttttaaaaattgtattcagttctcttgctttttcttcttccttttatctttgcttttctattcttgtttatcttatttttcatctcaagtggaactggctcaaagaatacaatcttcaacccactcccattcccatatctctcaaaagaccaatttaaagaaatagtatttacagactgggattctgcagaagaagggttaatatagcaggcctaacttcttatcctttaaaaagtctgcttacgtggttagccactggctggcattggggaacttggattttgagagatttcccattttcctaaaaatgacaagagtggcttattatgcctaaactatttgtacaaacagtatggtttatgctgaacacctgctttccttctgggagtccagttttgatacatgccaggcacaggctgcctacatgaccatcctgggtatggagtttctaatgagctttcctggttgataacatttcacacatgctaccacaacttcttgctttgagtcctgtgtcactctactggggaggatccttggaagtttgctcctggtttcccccagacttcaccccatgtgctgtttccctttgctggtttttctttgtattcttctgttgaaataaatcctagccatgaatgtgactatatgctgagtgctgtgagtcctcctagtgaattactgaacctgagggtgttcttgggaacctccaatacagggatacctgaaggaaattattttaaatgttctaaatctattcctggattaaggctggccaatggatggctacaggcctaggtcttactctatttgcctccaataaaattatttttactgaactgtacttgaatagcctttattttatatcaaaagctctaagaaacttgtcactgttttcaataagaatgttctaaaaatgcttttattactgtgttcactaaatgagaagaggcagaggaaatgtcattctggattaagaatcagggataggttgggcacggtggctcatacctgtaatcccagcacttagcaaggctgaggcaggcggatcactagaggtcaggggttagaggccagcctggccaacatggtgaaaaccccatctctataaaaaatacaaaaattagccgggcatggtggcactggcctgtaattgcagctacttgggaggctgagaatcgcttgaactcgggaggcagaggttgcagtgagccgagattgcgccactgcactccagcctggatgacagagtgagaccctgtctcaaaaaaaaagaaaaaagaatcagggatacttttgctttttctgaatttttgccaaactaacttcaaccttgaccaaattaatctttccctaacagcatttaccacatgtgtatttcagtcctatgtaagaaaatggtaaagacacacaaagaacttggaaatgtttcaaagatagtaaagattaatttagaaaaatagaagctattaggaaaggttaacatctagaaaagagcaaatttggctgggcacggtggctcacacctgtaatcccaacattttgggaggccaaggcaggtggatcacctgaggtcaggagttcaagaccagcctgaccaacagggagaaaccccgtctctaataaaaaatataaaaattaggcatggtggcgggcacctgtaagctcagctatttgtgaagctgagacaggagaatcgtttgaacccaggagggagaggttgcagtgggccgagatcgtgccattgcacacgccagcttgggtgacagagcgagactctgtctcaaaaaaaagagtgagctaatttcacccataatgttactatacaaatcgtaagaataatcaataaggttaaaacatggctaaaggctcattaagagtaacctgaagtcagagatttatacttaagggtgacaatatggcgtagtaaaaaaagcacatactctgaaataagacgagcatggtatgaattgcgttcttgcatctgtgttaacttgatcagcatactttggcttgccgaatctcaacgttaataactctaaaatgaggttaatgacatccgtctgacacctgagacaaatatctttctccctctgatagtgatgcttataataatggcttatgtttctaggagagaccttaaaattaactttttcagagaattagaaagattagatttcaggtttctgatttaagattttagaatctcacctctctcccaaggtcccaattaaggcaaaggaatacaaataataaccatatatctgaggacagaatgagaggagctattagatgaaatttcaataaatttctaggagttgaaaagtggacataagggtgctgtctcaggaaatggagagaaagctgcaggctagaatgtgaatggagagtatagtagaggagacggcagatatgcccagcagacaatcctaaggggttctgaaacaaaactgcgcaataaggaatgagggaaggagaagtggggctgaaaacaagcccctggcgtaactgcccactcatgtccatgagtcttaaatccacagagctcccagtcagcagcttttctattcctcttttttttttgagacggagtctggctctgtcgcccaggccaggctggagtgcaatggtgcgatcttggcgcactgcaacctctgcctcttgggttcaagggattctcctgcctcagcctccggagtagctgggattactggcatgtgccactacgcccggctgatttttgtatttttagtagagacggggcttaaccatgttggccaggctggtctcaaacaccttaggtgatccacccgcctcagcctcccaaagtgctgggattacaggcatgagccactgcacccagccccatacacggtttttaatgaaattattttaatgtactccaaataatattccagtaaaatgaggctaaaatttaaaaaggaagctatgagatataaaaagtggtgtgtccagccgggcgcggtggctcactcctgtaatcccagagctttgggaggctgaagcgggtggatcatctgaggtcaggagtttgagaccagcctgcccaacattgcaaaacactgtctctactaaaaatacaataattagccaggcatgttggcaggtgcctgtaatgccagctactcgggaggctaaggcaggagaattgcttgaacttgggaggcagaggttgcagtgagccaagatcacgccattgcactccagcctgggtgacagagtgaggctctgccccaagaaaaaaaaaataataataaagtggtgtgtccactgaagagatatctcaagatgatagctacgaagctgatcaagaaaggaatcagtcaaaactagaacatgaagttggcaggttgaagaaaatataataatatcatgaaatatacagattataaaggatgaaaaatatcacggacagggtggaaagtggcctatttcttccccccacgccccccccaccaaaaaaaaatcaagcagaaaggcaaccaaaaattccaacagaaattaaaactatattttaaaagtcaaagtccgaatttgaaacaaacttaaatgtgttacaatttttagatagcatggctgggcacagtggtccacgcctataatcccagcactttgggaggctgaggagggcagatcacctgaggtcaggagttcaagaccagtctagtcaacatggtgaaaccctgtctctactaaaaatacaaaaagtagctgggcatggtggcacatgcttgtagtcccagctactggggaggctgaggcaggagaatcgcttgaacctgggaggcggaggttgcagtgagtcaagatcatgccactgcactccagcctgggtgacagagcaacactctatctcaaaaaaaaaaaaaaaaaaaaaaaaaaaaattgagatagttcagcaaggaatgagaaagaaaatccacttgaccttgaatgagaaggaagttaggacagtggaccgcagtgcagaataacacttggctgttttgtgaataatacttacaatactgttaagtgctcatcatcagcttataaattttaagtctatagacaaagcatgataaacttaattacagttatagaacacaatgtaaatgccttcaaatttgataatatgaaagtaaagtttcacctgacagaagatgggaaatggaacagggaagagatagaggaatgactggggaagctaatacccctatcttcctaagaaggtaaagttaatactgaaagttgataggataacaaatagaaagttatgtacaatatttaaggttacaaaggtaaccaacaagtgtaaaaatagagggattcaactatcaaaagtttggaggtgctggttgggtacagtggctcatgcctgtgttcccagcactttgggaaacagaggtgggtggatcacttgagcccaggagtttgaaaccccaactctataaaaaataaaaaaactggccaggtgtggtggcatgtgcctgtggtcccagctactcaggaggctgagacgggaggatcacttgagctccagaggtggaggctgcagtgagctgagattgagccactgcactccagcttgggcaacacagagggaccccgtcgaaaagaaaagaaaagagaagagaaaagaaaaacgaaaataaacgaaaagaaacgaaaagaaaaaagaaaagaaggggctgggcacggtggctcacgcttataatcccagcaccttgggaggccgaggcgggcagatcacaaggtcaggagttcgagaccagcctggccaatatagtgaaacgccgtctctactaaaaatacaaaaattagccgggcatggtggcgggcacctgtactcccagctacttgggaggctgaggtaggagaattgcttgaaaccgggaggcggaggttgtagtgagccgagagtacaccactgcactccagcctgggcgacagagcgagactccgactcaaaaaaaaaaaaaaaaagagaaaagaaaaagaaaatgaaaaaaagaaaaagttgggaggcagtgaggagggggtggtgtgagattcagcatgacctttactctcttggaaaaataaggagaagcttcactagtcatttctctgtctctcctgtcagtggaaagtctaaacatgttgtttagaattacagaagtccatcattaaaggactaaaacaaaaaatgattaaattaattgaggccaggcccagtggctctgcctgtaattccagcactttgggaggccaaggcaggcagatctcctgagctccgcagttccacactgccccaggcaatatggtgaaaccccatctctcctaaaatacaaaaaattagcagggtgtgatggcatgcacctgtagtctcagctactcgggagactgaggcaggaggttgcagtgagctgtgattgtgctactgcactccagcttgggctgcagagtgacactccatctcaaaataataataataataataataataatggggaacaggccgggtgcggtggctcacgcctgtaatcccagcactttgggaggcagaggcgggcagatcacgaggtcaggagatcgagaccatcctggctaacatgatgaaacctcatctctactaaaattacaaaaaaaattagccgggtatggtggcgggcgcctgtagtcccagctacttgggaggctgaggcaggagaatggcgtgaacctgggaggcgaagcaagaccgtgccactgcactccagcctgggcaacagagcgagactccatctcaaaaaaaaaaaaaaaaaaaaaaaagggaaatagacacagggatggagagagatagagatgagactggtatttttctttatagccccctatacaattattttaataactgcacacaggtattttctttgataaaatcttactaataaatttcatctgagctggtttagagtagctctacctagtgattagcagtaaatggtatacaaattatgaaggacttttctattttcagattgaatcatgtacagatgaacttgcccaggctggtctcaaactcctgaactcaagcaatcctcctgcatcagcctcccaaagtgctaggattacaccatgcccggttatctgtatgacattaacatcatcactctgctcccttcaaatttccttaaaatgcaaatgtaaatgtccttaaaatgtaaattctaatggaaggggagggcagatggatatcattcgaaagatatatccacacttatcaaaaattaagaaatacatatgtatgtgtatattatatattatgcatatatgtatatattatatatgtacatagtgtattaatatgtatacatatataattttatgtgtatatattatgtatacatattgatacattatatatttatgtatatatgtacatatatacatataatgtacataattatatgtatatacatataatgtacataattatatgtatatacatataatgtacataattatatggcccgggacggctgctccgacgaaggcccgggcctggggagatggaatcggtggcagagcgaggagtgactggctccggcagtgcaccaggcaccccgccaggcaggtacctgttcctggtttcaaactccggagctcaagcaatcctactgcctcagtctctcaaagtgctgggattacagaggtgggccacggtacccagcctatcagaaacatttaacactatatatatatatatatatatacatacatacatatatatatacacatacatatatatatatacacacacacacacacacacacacacacacacacacaacaaagcaatattactagtggacagacatagaaatagctttattggccgggcgcggtggctcacgcctgtaatcccagcactttgggaggtcgaggctggtggatcacctgaggtcaggacctcagagatcggcctgaccaacatggtgaaaccccgtctctactgaaaatacaaaaattaaccaggtgtggtggggggtgcctgtaatgccagctactcggaaggctgaggcaggataactgcttgtaccaaggaggccgaggttgcagtgagcggagatcgcgccattgcattccagcctgggggacgagggcgaaactccatctcaaaaaaattaaaataaaaataaagagagaaaataataaacccagcaaacatttatggcaaacttcctacgtgtcaggcactgtgctaaatgcttcatgagcagctcacaagtattatcatctctgttttacggatcaggaaattcaggtgtgcagggaggttaaatgcccaaagtcacacagataagtggtaggggactaattaaatctgttccaaagcctgcgctctaaaaaccagagtaaacttcctccatttctggggccacaactataaacactgcattccagccaaaacacctctaagaaatctgattaaaaagtaggggacagatttgaccagttcagcactgtaactaaaggctgaattcacaggcttttggcaggtgatcaaatttggtttcttccttaactctcagggacaagaaacagtcctgggtgtcttcaggaaggtatgagtgtcaatgaagaattgtcttaacgtcgcatatacgtattggaacatgcttctacttgaacagatattacaataagaaaagggcaaattccaacggctctttctccgggaaagtcaagttaaagtatgttaggatacaggagaaggctgggcagagaggttagttccctatttcctgagaactatgaacaattttacctacccactgcccctccctcgagctctcttccttatccccaacccccatctccggcgcccaaatcccctgcaggcacccaaaaaacatttctggaaaacaaaaagacaatgagctcttcgtttaggccgattctgggagtcatctggatcttgtgtccttacgaggacttgacccgctgcctgtcagcccaaagtgcgcggcggctggggacagcggggagcccaggaccggggtcggccgccactctgcctgaacaggacaaaccggcacccagccctaggttccccacctggaagtcctagggggtggggaggaaggggaaagcaggagcccgcctctctcgcccggcaactccgcttcagcgtctccccgccaggcccaagcctattctgctctcgggctgcggcgcctcattgcgggagtcgaggacgcgggttaaaaagggggcccgtggagggtgaggtgagcccaggatggccgctccgacgaaggcccgggcctggggagatggaatcggtggcagagccaggagggactggccccggcagcgtaccaggcaccccgccaggcaggtacctgttcctggagttagcaagcagccccgaccgtcttggctccgcctcctcagttttactgccgcgccgccgccagaccggttgctgggaggggagtacgcaacgtgccatgcgcagtggggcgaccgggaggactgatagagcgctccgccccaccccgccctgcggggaagtcccgccctttccgagtggccgcggctgcggcaggccctagcagccgccgccgcgccgagagcggttctcagttcccgttgtctttcccgccgcgcagcgcttccgcctacagcctccgcccccgcagcaggagggggaagcaggtggcttcaacaatgaaggaccagagaaaggcaaacttggctgttcctgagaattgtgtttttctcatttcatgtggtaggacttctaatggaaaacccgcctcgcacttttcttggacgacatctcaaatgcccctcactttggcctctcgggcaccagacaacaagctgcaaaggggaagcccatcctttctttgctccccactatttgtaaaacaaggaaaatagctcaactaatgaaaacgatcttgtcccctcagtatctttttttttcccccgaagccttcctcatccacagctgaagccgtttgtggaaacctatcaggtttgtccaagccaggttatgcagagcttgagaaatgaggaagcgatgaactaagcctcactcctgtgagactaggtttttcagtgacttatcccccgcgtgcgcaggagggggtatccaaaacgcggatatataccatcaggtaatgaacactcgctcttgccagctctgagctttgacacagatttagaccgtcctaacttccaagactgggggaggagtttagctacatccaagtagggacttatagaaatatgcccctggaaggccgggcgcggtggctcacgcctgtaatcccagcactttgggaggccgacgcgggtggttcactaggtcaggagatcgagaccatcctggttaatacggcgaaaccccgtctctactaaaagtacaaaaaaattagccgggcgtggtgacaggcgcccgtaatcccagctactatggaggctgaggcagcagaatggcctgaacccgggaggcggagcttgcagtgtgcagagatcgcgtcactgcacttccagcctgggcgacagagcgagactccgtctcaaaaaaaaaaaaaaaaaaaaagaaaaaaagaaatatgcccctgaaactgtgggacctgtatgcacatgagttctcatttgatcttacatacatcactttgattttttttttttttttttttgagatggagtcttgctctgttgcccaggctggaatgcagtgacgtgatctgggctcactgcaacctctgcctcctgggctcaagcaattctcctgactcagcctcccaagtcgctgggactacaggcgcacgccacaacgcctggctgatttttgtatttttagtagagacgaggtttcaccatattggtcaggctggtcttaaaatcctgacctcaggtgatccaccagcctcggcctcccaaagtgctgggattacaggtgtgagccatctgtgctgggccacatcattttgattttatcgagtgctttgacattgctaagggctaccctcacatgctctcattctcaaaataagatgccactctcaggagcaaacttggtaaactcacaaagcaacagagtataaacagagaagtaaaatttctagcagtgttctactgaagggtctttcacatgtggtcttttggaaccgagtattagagagactgtctgaaaagatgctaaacttcttgcagccattacaaatgggtagagaaaacatattgtctcagaactgttctgttttagcagtctgtaacagaagacactcctatgggtataactctttttttttttttttttttgagacggaagtcttgctctattgcccaggctggagtgcagtggtgcaatcttggttcactgcaacctctgcctcctgggttcaagcgattctcctgcctcagcctcctgagtagctaggattacaggtttgtgccaccgcacccggttaatttttgtatttttagtagagacggggatttgccatattggccaggctggtcttgaactcctgacctcatgtgatctgcctgcctcggcctcccaaagtgctgggattacaggcatgagccaccgcgcccggcctcttgtctctcttacatcgtttcacatcattcaaaatgagaggaggcaggaatggtaaggaatgagaacctgggatgataaagcacagtgtttcacctcttcctgccaaatccactggattcttgtacaacacaattctaaacaattcctactgaattgccaattcctactgaatgggtggaataagaaatcaatgtttttctttggtctaaattccatctaaagaaaggagttagggccaggcgcactggctcacgcctgtaatcccaacactttgggaggccgaggtgggtggatcacgaggtcaggagatcgagaccatcctggctaacacagtgaaatcccatctctactaaaaatataaaaaattagcagggcgtggtagcacacatctgtagtcccagctactctggaggctgaggtaggagaattgcttgaacttgggagatggaggttgcagtgagccgaaattgcaccactgcactccagcctgggcaacacagtgagactccatctcaaaaacaaaaaaaagaggagtttcacatctggtctttacaggaaaaggtttgctactactaaggaaacagaatcataagctactcccctcttcctcaaaaaataccctatcaatttttgcagataaagaactctgaaaggatctgcttggtttccattgggagaaagaaaagcaaaagagagtaaagcaagaatgcatcacttggagaccagtcctagatgatgccttatacttgcaaagtgcttaaacagtttacaaaacaatctcacatatatattttctcttagtgttcaactacctgtgaagcaggcagggcaaataattactatcctcacttcacattaggttaataacttgccgaaagtcaaaggattagtaattagttctgctggcactaaaagccaggtctttgtcttacagtccagtgcttattttggcattgctaaacatccaggcaatgcaaatgagattggagacttagtggttttccagtttgtgacactaaacaacatcctcctctctttgtcctcgcattcacaggagagttaatggagtcttaagaggtggaatgcagggaggagcccataaataacatatggggctctaaaaatataaaatgtttttaaaatgattgaatggtaataacaaaaggaatattcagatgaactcttttgaaggaaaagcatttcagtgctgacttttatcgaacagaaagaattttcctctgagcttatactcttgtaggataactccacaaagtcaaggcggcactctgagattttgtcaatcactttaatagatgtccataggtagttcatatgaatgcttaagttacaaaattagctgccatggtccaaatgtatgggactttaggaaagcttttcttactcaaaagataactaagactatcaactttgatttctaaaatgtaatttaaaggtttgtaaaacaaggccactactataattatataatattaaagtaattaagttttatgttagttattttaataacaacttcatgaactgttaaaaatattacatttgcatctctcagtttacatatttctgtattaacttggagaaaaacccatgtgaaaagtttccatgcagttacaaaggcagcagcacatgctgttttcacagcaacttgttattgcctcagaacaggcctgcactaaagcatcaacaaaaaatacccaccaccccactcccaccagaaaacccaacccttacccatccccggcaaaaattacctggtacaagcaatgacctaaaaatgctttcttggtaagaagcatttataaaatgcagagatctgaacaagctaagtgctcgtgcagatacatgggcctctcctccaagagttggttccgcaagaggtggaaagaactctcaatagtttaggaaagctcattttcaaaagtatacttacacatattcatggccatttctttgaaagaacatacccagcctcaactgtggaaaagataaaagcagagggagaagcaacggcacacagccataatatagagaacagagcttctccatgaacatccaccaggctgcagcaaccaagaaggaaaaaacatttgtgatttcacacagaccaatgatcttacctaggtgaagcattaatttttcatgcatttgttactcaagaaaataaacatacaaccacttaaaatacagcattcacgttgtcactggttcgtggtatcaggtaaggaaaaaatgatgctcctgtccctagaattttccatgtacatgtcagtatcctaatgcctacagacttcctattaattttgttatcagcatctcccacctaaaaacatatactacattatgttctgggtccctgaaatttcattactacatacagtgttctaatttttactttttctcaagtttaatgtagacatacaagaaaacatcaagcaatgtttattgtgcaattccaatcattatttgcagaatcttggtttagagtcagtctttatagccatttcaactgcttggtttaaacaaaaagcaacaatctggttatctacctataaatttcacggtatttctttaaacactgaagtactaaaagcactgatgatttgtattataatttttaaaatatttaaaacctacacagatttcatagatcattccttttataaaataatcaaaataatttgattatctggaaaaaaaaattcttgaaacagagccctttccaggtatcttcaatctctgtaaaaccccaaaccccaaacagagtagatgatgaaataaggatttctcagttgcccaagactgtctgaaatttaaggttgagaaatggactggcgtttttcatgtttcctgtgaattcagagcttacaggtggcatcagaactcaaatctctgggatggctttacatggctttcactttgatttgtttcattttcatttgcttcttttccaacttcttttgctcacgcctcaatgcagcctcctagagaaagaaggggtaataaatagagaaagggagtggggacgagagaattcaaattaagcttgaaacatatgttaaaaaaaaatccaaattagaatactgcctatagtattattcaaaaacttaggcttgcaccataacattctagaagatagttataaaaataattgccaatatctacattagtgaataaaaattaaatcaacttcaaatgaagcaaaggtaaactaaaatctcagttttgaaagaaactactataattaaccagcctttgttattctggtttgatttttttctgtacccagggaacacttagcctgatgttcaccataccattcatgatggcattatatcataaatgtataactgccagaagatacattctacttcagttcaataaattttaagaatcttgttccatcaggttattcattgcaaatttcttattagcacagacaccatacctgcacataatacttaaattcataatgctctatttgagacatcatatttatcaaatgtgataaaaattatcaaatttatcatatttttatttaggaattaggaagttacatagaagagtaagaaggttcaggttattattacgtggactgatagaagccttagaggtcaagtcaaagtatgacttcactgttggccactagtggtcacacctgattaaaagtttatttcagctacaatctcaaacttcttatttttagggtactggggtaaaaatgtgctcagaaatatactcaactggtacaggatggagaaaatagggaagaaaagaagaagtgcaaagcatatatagttcttcatagtgcaacaaattaggtttcaaagggtgatttgtaaattcctggtttgggaactattgactgtcttaggttttttctttatttttttttgagatagggtcttgctgtgtcacccaggctggagtgcagtggcacaatctcgggtcattgtagcctctgccttccgggttcaagccattctcctgccttagcctcccgagtagctgggattacaggcatgtgccaccacacccagctgatttttgtatttttagcagagacggggtttcaccatgttggccaggctggtctcaaactcctgacctcaggcaattcaccgactatggcctcccaacgtgctgggattacaggcgtgagccaatgtgcctggccaggtttttttttttgtttgtgtttgtttttgagacagaattcttgctctgttgcctgggatgactctcctgcctcagcccccggagtaggtgggattacaggtgtgtgccatcatgcccagctaatttttgtattcttagtagagatggggtttcaccatattggccaggctggtgttgaactcctgacctcaagtgatctacctgcctcggcctcccaaagtgttaggattataggcatgagccaccgcgcccggcctatcttaggtttcttttcaatttttttttgaggtggagtttcgctcttgttccccaggctggagtgcaatggcgcaatcccgactcactgcaacctctgcctcccaggttcgatcccaatgtcctcttcccattgtcccaacccctaccttcaccacattcactcttttcccagcactatctatccctatctcccatattacatattacacacatgtgtaaaactaatgatacacagaatacaatatcatgtataagaaatattggccgggcgcagtggctgaggctggtgggccacttgagaggtcaggagttcgagaccagcctggctaatgtggtgaaacctcgcctacactttgggaggctgaggtgggtggattacttgagagatcaggagttcaagatcagcctggccaatgtggtgaaacctcatctctactaaaaatacaaaaattagccaggtgtggtggcgggcacctgtaatcccagctacttgggaggctgaggcacgagaatcacttgaacctgggaggcggaggttgcagtgagccaagattgtgccactgcattccagcctgggcgacagagtgagtttgtctcaaagaaaaaaaaaaaaaaaagataaatatatttatgctagcacatttaagagatatttatgttaagtcaatacacatgaaaaatgttcaacttcaaataataattcaaaaaatagctgggcgtagtggctcacgcctgtaatcccagcactttgagaggccgaggtgggtggatcacctgagatcaggagttcgagaccagcctgaccaacatggtgaaaccccatttctactaaaaaatacaaaaattagccgggcatggaggcaggcacctgtaatcccagctgaggcaggagaatcgcttgaacccaggaggcagaggttgcagtaagctgagatcatgccattgcactctgcctgggcaacacagcaagactatgtctcaaacaaaacaaaacaaaacaaaacaagtgggataccatttccccactaccagaataaggaaaaaaaaaaaaaaaaaagacctggcacggtggctcacgcctgtaatcccagcactttgggaggctgaagcaggcggatcacgaggtcaagagattgaaactatcctgaacatggtgaaaccccatctctactaaaaatacaaaaattagctgagcatggtggcatgtgcctgtagtcccagctactagggaggctgaggcagaagaatcgcttgaacccgggaggtggaggctgcagcgagctgagatcgcgccactgcactccagcctggtgaaagagcgagactctgtctcaaaaaaaaaaaaaaattaataactagtttttgaaaagatgtgagtgaagaggagctctctggctgggcacagtggctcacacctgtattcccagcatattgggaggccgaagcgggaggatggcttgagcccaggagttcgaagctgcagcgagctacgattttgccactgtactctagcctgggcaacagagtgagaccctgtctcaaaaataaaaataaaaataaattaaaagaaaaaaaggagctttcatatcatatactggtagagggggttgggtgggttgttctattgagttcaccagatctttttacaaggtgcccagaccagatactataaagtggtagttcaaaaaaattaaatgatttacatcgacaagaagcttacaatctgactcaggttaagtttcaggccccctcttcctttaactcattatagtttcaaaccttagaaagaaatgtagaacttccttttatagaaaaatgaaaggcattacctattaatgattcctctgtagattcttcacatgtacataaaaagccatatttatttataaagaagactgcataaacacagagctacattttcaggggaaaaatacctatcactaaaccaagtcaaataaaacaaaaaaatgataaaaggggtaagatgatgatgacaggcctgcagtatcctgggcagttcactcaacagcattaatgacactgctgtcaaatgcaggcccgcacagcagctcacattttcttggacacgtgacccctttgctcctaagaatattcttcaattatctcaagattattcttactaaaattcacatctttcagaactttgtcctctcccttttttttttttgagacagggtctccctctgtcacccaggctggagtgcagtggctcgatccctgctcactgcaacctctgcctctcaggttcaagcaattctcctgcctcagcctcctgagtagctgggattacaggcacgcgccaccacgcccagctgatttttttgtttgtttttagtagagacggggtttcagcatgttggtcaggctggtctcgaactcctgaccttgtgatcctcccgcctcagcctcccaaagtgctgggattacaggcgtgagccaccacgcccggcctgtcctctccctcttttttttttggctgcccaggctagagtgcagtggtgtgatcatagctcactgcagcctcaatctcccaggttcaagtaatccttccacttcagtctcccaagtagttgggactacaggtatgcaccactatgcacagctaatttttttttttttttactagtagagacaaggtctcatgatgttgcccaggcttgttttgaactcctgggctcaagcaatctgcttgccttagcctcccaaagtgctgggattacaagcgtgagccactgcacctggcctttgttctctttcttgaccagcatttacaaggtctaaaatttagagctgagtggcgcacacctgtagtcccagctacttgggaggctgaggcaggagaatggcttgaacccgggaggcggagactgcactgagccaatattgcgccattgcactccagcctgggtgacagagtgagactccatctcaaaaaaaaaaaaaaaaaaaaaaaaaaaaaaaaaaaaaaatttagagctggactatggcatcttatttcagaaacacatcagatcataccgagctttcaaatataacatactatacccaaaaagcttttgagtttgagattctagttaggtaaaaaacagaaaacaaaaatacaaacaaaaatattggaaatctctaattctataatcagattttaaattttacatagcaagtttatttagataatagggcgcatgtgctgccttctattaaaatttctaacttctttctaccaaagtgtttggctcgaaaactgataatggaattttcaaaatgaaattgtgctgggggaacaggataatactgataatttttcacgttcacagactcagtgtggcacggcttgaacaggaaggattatttattcttctttatagtgttatcaattgatacaatgtcccaaatgttgagaaaatgctaaacttttagcctacaaagattaccttaacaaccaacagaacacaagcagtcatccttacaaatcgtagttttaccccagtgataagtttgtctaacctccagcctgcgctgtttctcaggatcttcctcattcatgattcgctccttctctgctctttttttctcctcccgccgagactgtgctgcttcctgtctttgcacatgtgtcagtttcaagaagttctcttctactcgggcacggttcttatctgctttttgtttgcccttccccaagaaacaaagtatttcataagaaatccatttctagtcaacagcaacaaaatcccgtttagcattctttcataaaactactcccatttggcacttctaaatcaactagcaaaaattcagtcactgaaatcattgatagctgccctcccccttgagaagaaacaaaaaaaggtgccaatttatataatacaggcattgggtcttacttctctgttgagtcggaactttttggctttatcaatagaataaatcaccatgttcatcaggggtagcagtgcctccatatcctttgggtaagtgttacctgagccaggcactggaaaacaaagccatttttcctactgagttaatggtagcattaatatttccaggtcacccaactcttttttttttttaatcttaagagactcatttctctaagtttgttaggcagttaaaatgcagcagaaaatataaattaaaatatataataggtaatttcttcttgaagaaatctggaaatcagtaagcaagcacaggcttatagttttgacgtagttttaaagctatcatttaggaggaaacaatactctccttaaggtcatctcagagaagactaagaacccagaaaggacccagaatacttaccattaaatgtaaacaacagtgtcctcttagtgtcaggtagctttaaaggctgaccttccctgtcataaaagaaaaggcaattaagaaggaatacaagaaagatgttttccatgtacacaagtcacccaatacacttagatgaacagatacctgcacataatcagcacagtatttggcttggcatacccaagtcaaatataatgaaggagctttacaggtcatctggtccactcgtctatctgatggatgcattctcaagtgatctttatcctatatttgaacacctccagtgatgttccctccaggcaagggtatattccatctcacctggggagccagaaatgagcctatatttaagtatgaggcccatattttagatacatttttgcttattttgatgcatttttatgttttatttccaactcctattctatcttcctataacaaggcatcttattatcttatttttgagttaggctcagagtaaatttagggataatctactacagcatatataatttagttctgtcattgaagattcctttgtaatctctgcctatatgaatcctttgactatcaattgccctccatctcatatttaaaaggcatgatgaatgctacaatgtgaaacactgtcctcagtgccactgagttgagcaagacaaggatgatgcagcactatctagaggcataaggacctgagtaatcttagtatacaactaaaatccagattggcttgaattgtgctcaactccacagcctatcagagggtagtctttaactaaaaatttagtcagaaccagtttcaaaccgagcataaaggtaaataaatatgctctcctgagacaggctgtgaattcaaagaacaaatccaagtcctgaatatgtactcctgaacagtattactataaagctagaaaccctatggacattgtgggcttctatgctaggaaaggatacaatcacttaactattcaaagagggaagccagaaaaggccataaattacaaaacacacagatttgtaatcagacataagtcaaacatcacacacaaattattatcataaaaaaaaagaacctatggactggggcatggtggctcacgcttataattccagcactttgggaggccaaggcaggtggatcacgaggtcaggagttcgagaccagcctgaccaacatggtgaaaccccatctctactaaaaatacaaaaattagccgagcgtggtggtgcacgcctgtaatcccagctactcaggaggctgagacaggagaattgcttgaacccgggaggcggaggttgcagtgaaccaagattgtgccaccgcactccagcctaggcaacagagtgagacagcgtctcaaacaaacaaaaaacaaaacaaaacaaaaaaacccactgcattttattagtaccagccattctgtaagattcccaaccatctcactgagtcagtggcacaaacatgcagggacacatacaaactgggataggggaggctcatttctctcccataggtttacaatgacctcttatgatgcatgcagtcaaagcaaaggaaaatgtggaggcctgtcaccaacttccttcacacatttggtaagggatattgcagaagcaccttacaggtgtttcaacacagaaagctagtgaggaaaattaatttcaacaattttatcttatacgtactcttgcataatttttggaccagagaactggtctgaaaaatgaacagattcaatcttgtcagcatagtgtgtaagaaagtgaaccatctgaaaaaaagaaaataatattttttaaaagcaaggtttaatgcatttccctttttttcctaaagatattcactctttgagatggtgcaacggctcacaccagtaatccccgcactttgggaggcaggtggattacttgaggcaaggagtttgagaatttgagatcagcctggccaacacagtgaaacaccgtctctactaaaaatacaaaaaaattagccgggcatggtggcatgtgcctgtaaccccagctatccaagaggctgaggcacgagaagcgtttgaacccgggaggtggaggttgccgtgagcagagaccacgccactgtactccggtctgggcgacagagcaacactctgtctcaaaaaaaagaaaaaaaaaaaaaaagaaattcacctttcaatccttacttttatacaatgtccttcattaagaccaaagcgtgttcattgctttttatttattttttgtgacaaggtgttgctctcttacccaggctagagtgcagtggcacaatcatagcttaccatagccttaatctcctgggctcaagtgatcttcctgcctcagcctcctgagtagctgggactaaaggaacacacaaccacacctggctaatttttttattgtagagacagggtctcactatgttgcccaggctagtcctgaatccctggactcaagtgattctcctgcctccgccacccaaagtgttgagattacaagtgtgaaccacagcgcgcggacaaggctaaagctttttaaaaattaaatttcaataagatagggaatctctttagaattaaagtagtactccaggctgggtgcagtggctcatgcctgtaatccaagcgctttgggaggccaaggtgggtggatcacttgaggccaggaattccagaccagcctggccaacacagcgaaaccccatctctactaagaaaaaaaaaaaaaaaaaaaaagtagtactcctttttagtcataccaatgattaagattcttttcgagcagctaaaaatatttctcaaaataatggtcgaaacaagaatgaaagcataaagataacacctaaaataatttcaggggatcctttataaacatgtcaccttgaacttacatttataaccatctctgagttatcctgtattcttatgatactaagatctgttaccattacacaaccaatagaaagaaatggctctctcagccaggcacaatggtgggctcttgctgaggcaggaggaacacttgagcccagaagtttttgatgctgcagtgagatctatcacacacatgaatagccactgcactccagcctgggcaacatctcaagaccccatctttttaaaaacaaaggaggagggctctctacacatccctcttctcccacacaaactggagctcaaaaaaaaaaaaaaaaaagactaaatgacatgacgaaaaagattagaagctatattcctttttcaaaaaaaaacctgaaagtcattagcaatcccaggaacaatttgctcttgatttagagaacttcttgactaatcaaattgtccttttgacaagctaatttattgcttaaagaaggtattttaatatttgtgtgggaaaggaatgtaaaactaatacattgccataaaatgatgaacttgtacaatgagacttttagggagagtgtcctgtaaatgccaaggcctggcaaatgtatgtcttctgtcgcatttacctttgtatccatcattccgtctgtgacttctcccatctctgacaggatggccaaagagtccggcagtccatactttgctccagacttaggtttatcactacaaaactcactctagaggaagaagtaattgaaagtaagatatgaccttttattatgcaatgaagctgaatatgtgtgtgctaaggagacacagttctacgtatatttgagttggagcaacctgacataccaaatcctgcatctctttctgtagtcgcaccaaggctttccgtgtgccaacagcaaatacgtaggtatccatgtcttcatcattcatggttacttttatttgcttttaaaaaaatgtaaaaaacaacaaaattcacctgttaggttctgtgataggcagatttctaaatgacccttaagattccctccccgctggtgcatatactctccctttaagtgattgggatttgcaaatatgatggaatattacccccataatcaggctgttttatggcagaaggtccctaatcagctgactgtgaattaaccaaaagggacattatcttgggtgtatccaacttaatcaagcaagtccttaaaagggactatagccctacttgaagaagaaagtcaaaatatgaaagggcttatgggaaggttggcggtagggcacatatggtaaagacctaagggtggcctttaggaactgagtggttcccagttgacagctagcaagaaaatagggactacagtagttcgtgcctttaagcctagctacctgggaggctgaggcatgactgcttgatgtcaggagtttgagaccagacccgatctctaaaaaagaaagaaaaggccaggcatggtggctcacacctgtaatcctagcactttaggaggcaaaaggaggaagactgcttgagcccaggagttcaagaccagcctaggcaacataatgggaccccatctgtacaaaaaaaaaaaaaaagaaagaaaaattagccaggcattgtgatgcatgcctgtagtcccagctactcaagaggctgaggcaggaggatcgattgagccccagaagctggaggctgtagtaagtgatgatcgtgcactccatgctaggtgacagagcaagaccctgtctcaaaaaaaattaaaaaaaaaaaaaaaggaaaagaaaacaggaacctacacccacaaggaactgaattctgccaacaacccaaatgacattaagaggaccctaagcttcagagaactctaacctgaatgacatcttgatttcagcctgttaaaaccctagaggacccactcaatacatgctgcacttctgacctgcagaaacggtaacataataaatgagggttgttttaagctgctacacttgggtaatttgctatgtagtaatagaacacgaatacactcaatacttcacacaggagcactcaagtccaaaaataaaaaataaacaaaacctaaatggaataatgtggaataaactgaaatatatttggtttttatcccaggtttcaggcacagagctcctaaagccctttgaatttcctgaataacaagagtatcttttgttacttatactgagccccttttaatcacacctgagtttattctaatggggtgacttaacatagaccctagttagcctcaggatggtgccgataaccagaaaaaccaagtgcttagagggtagagaccttcagccttgcccttacctccgtgaaagagagggaggacgaaattgagttctacaaaaactcttgaacaagatttagagagcttccaagctggtgaacacatcaacctgctgggagggtggtgtgctcagggagggcatgaaagctccgaacgactcccaaccctgtttcttcctgtgtctttctttcatttggctactcctgagttttatcccttataataaaccagtaaatataagtgtcttttcaagttctatgagccattctaacaaattattggttgagtggggaggtcataggaacccgattaatagttagttggtcagaagtccagatggtagtatgggtaacctgggacattcgactgcatctgaagtggggcagtcttgtggggctgagccctttaatctgtaggatttgaagctaactccaggtagatagtgtcagaactgaattgaggctgggcacagtggctcatgcctgtaatcccagcactttgggaggcccaggtgagaggatcacttaaggacagggcaacatgaactgcctgggcaacatagcaaatctcggtctctagaaaaaaaaaaaatttaaatttacaaaattaaaaagaattattattattattgaattcaattgtgggatacccagttggtatacagagaatctgagaattggctgtttgtattggaaaacagtccagacaagtaaacagttactagtactctgggccagaaagataaaaaattataagcctaaaagagtctgatatgatatatttgttatattaattacatctttaaatgcttgggtgaaataatttttagtatatggaagaaggaaaatgttaatataggaaaagaactggtaagatggcagctgtaaaagaaaacgttttctgctcttccatcattgatgggaaattacacaaagcaaaccttaaacagaattccaaaaaaaggggcaaataaaatataaagagccacatatttgttgaagcaatttctcttagcaggaggagagagagagagagggaatgagaactgaaaatgattaaaacacttttaaagaataatttttacaaaaagatggctgaggatacagcaaactttcctcctaataagatggcagtttgtgggagaaaggatgacagaaatattaactgatagggttctaaattttagtggactaagtcatcatggccatgttagaaaaactgaaataaaaatacaggtttacaagtaaaaatgagatctttaaaatataacagtggggctgggtgcagtgactcttgcctgtaatcccagcactttgggaggctgaggcgggtggatcacctgaggtcagaagttcgagaccagcctgaccaacatggtgaaaccccgtctctactaaaaatacaaaaattagctgggcatggtggcaggcgcctgtaatctcaactgcttgggaggctgaggcaggaaaatcgcttgaaccctggaggcggaggttgcagtgagccaaggtcaagccattgcactccagcctgggtgatagagtgagattctgtctcccaaaaaaaaaaaaaaaaaaatatatatatatatatatttatatatatatatatatatatatatatatatatatatatatatatatataaaacaatgattttcaatccaataacatttgaaagtacccaatttacatcactaacaaagcacttactaaccaaatactatttcacactttcacatatatacatatctatctcttgttctattatagaaaagaaaaaaactgtcttctatatttttgtttcttgtagcagtgggagccagcataattatttattgaaagaatgaagaggccgggtgcagtggctcatgcctgtaatcccagcactctgggaggccaacacgggcggatcacgaggtcaggagatcgagaccatcctggccaacatggtgaaaccccatctctactaaaatacaaaaaattggctgggagtggtggcggacgcctgtagtcccagctactcgggaggctgaggcaggagaattacttgaatccaggaggcagagattgcagtgagccgagattgcaccactgcactccagcctggcaacagagcaagactccgtctcaaaaaaaaaaaaaaaaaaagaaacaatgaagaaggaatgtggtatttgtgacaaaggacacaatttgcagataaacatattgatttaataaaggaaagaagatacaccaaacataaggtcctcagatcatgactggagcttattcggccagaaacgtattatttgaagcaaaacatatttgagaagaaacccagctatctgccaaagataaaaacatatacaaggagccaagttacccatgagggccattacctttcacaattgctttgccctctattgtcaaggctaactccattgatctatgtggtgacagagtatcacctctttcctaccaaaaggcccatgaaggccccctgacagttgcacagagtggaagatgatgctctgtccaaggagaaaaagggtccattttttgtcaagggacataaattgccagaaactccaaacacaatccaggcagaaatggaaaaagctctaggaaataattcagtctggggaaagcgtgatggctcacgtctataatcccagcactttgggaggccagagtggatggatcacttgaggtcaggagttcgagactggcctggccaacatggtgaaaccctgactctactaaaaatacaaaaattggccaggcgtggtggtgggcatctgtaatctcagctacttgggaggctgaggcaggagaattgcttgaatacgggaggcagaggttgcagtgagccaagatcatgccattgcactccagcctgagcaacagagtgagactccatcaaaaaaaaaaaaaaaaagaaagaaagaaaacaaataattcagtctgtacacagaaaaccagcgggaagaatacataccacttgatcactcactggcctcatcatccgggccaggacattcagtaagtcttgtctcttgaggaactgaaaaaaatgagagaagtaagtaaatccaactgcaactcctacttagtataaaaaaaaggccttgaaggagaatcaaatgcttcatcaaatatactttacgacacatttgccagttagtataaatatcacttttagacctcattttaagtcaaacatgaagggataagatgctgaattggggggctgggaatcacaactggacaaaattaagggaagatatatatcgtacaagaagtttcctacttaccctcagctggataagcatgccctcacagcacactcgaccagaacaccacaggttatagatgtgctcattctcctggttcaactttcctgtgcttgtggcttctttgttagttccatcatcccctaggggtaaaaccacttaatgtgactcaacagaaaatgtcaaggccgggccgggggtggtggctcacgcctataatcccagcactttgggaggctgaggtgggtggatcacgaggtcaggagttcgagaccagcctggccagcatggtgaaaccctgtccctactaaaaaaaaaaaaaaaaaaaattataaaaaattagccgggcatggtggcgcgtacctgtagtcccagctactcaggaggctgaggcaggagaatagcttgaacccggcaggcggaggttgcagtgagctgaaatcgcaccattgtactccagcctggatgacagagcaagactctgtctcaaaaaaaaaaaaaggaaacaaggccgaatacctcacgttcctctaccctgaccacaaaatgatcacagcttcagagtagcaatactttgctgtcttatagaactgtttggacagggactgaaatagattagcactgttcgttttacttttaaaactattgtctgtattagaagaaatatggattctaagcacatgcttgtcagtttaacgatgatcagcttagagtataagtctctcagagtacatacaaaatgggaaaaaaatcagttgaaatatctctgccaaaagttaaaaactcctatggagtgaataaaaaataccattaatacaaactactcaacaatttctcactatgtctcctatgaattaactttaaccaagctttcttttccaatgcaaaatgataactgggtcttactaatggtattaagagttgtattttaactctagaaaaaagctcaaattccaatactttctctcttcatttaattcattaagtatacaaaagaaattgctcaacctcacaagggaaaacggactgatacaccaaatgaaaacaagcaaggggaagtagaaggagccaaagctgctcatttattttttttcgaatttcctggtcaaaacatactctgaaatactatggtatagtggagacggggtggactttgcaaacaggtagataagttctgatatcttggttgcaatttaacagcttagataagttttaacatttctgcccttcagtttcctccttaggaaaacagcaactatagccaattgacagtgttgttacaaaaagtaaataagaaacactgtatgcaaagtatctagcataatatataaacactactgtgttgcagagcaggtggatacatgcttactattaaagagaaataaggtgctaaatgccaaataggtgaatgtgaggttagtccacctcattccctacattgcacaactacagaggttccttgaagtccttcaatgtatatttcagcagtggatccaaaactcaagtgtcagattctaagggaattttgagggactttcaatttctaaaagatgaattgagagcatttatcaagctacctaaaatgtcaaactttcttggtttccgtcagaattttatcaacttgttttgaaaacatcgattacattatactaatcagaagctgtttagcaattttactgctgactcatgaaagatgagaaaattattaaatacaatatattcttatttttagaaacagggtctcattctgtcacccaggctggagtgcaggagcatgattctgtaccactgcagcctcaaactcctgagctcaattctcccacctcatcctcccaagtagttgggaccacagaagcacaccactgtgactggccaatttttattttattttatttgtagagacaaggtctcactatgttgcccagactggtcttaaactcctggccccaaataatcctcccaccttggcctcccaaatcactggaattacacgtgtgagccaccgcaccgggccaaaaaacaggatcctcaaggctggatgcagtagctcacgtctgtaatcccagcaatttgggaggccaaggcagccagattgcttgagcccaggagttcgagaccagcctgcacaatatgatgaaactctgtctctacaaaaaaaatacaaaaattagctgggtgtggtagcatgtgcctgtagtcctgtctactcagaaggctaagatggaaggatctcttgaacctgggaggtcgaggctgcagtgaactgtaatcataccactgcacacaagcctgggtaacagcgtgagaccttgcctcaaaaaaataaaaataaaaaggccgggtgcagtggctcatgcctgtaatccctgcaatctgggaggccgaggtgggtggaccatgaggtcaagagattgagaccatcctggccaacatggtgaaaccccgactctactaaaaatacaaaaatgagcagggcatggtggtgcacgcctgtagtcccagctacttgggaggctgaggcagaagaatcgcttgaacccaggaggtggaggttgcagtgagccgagatcgcgccactgcactccagcctggtgacagagtgagactccatctcaaaaatagtaataataataataaaattaaattaaattaaaaaaaaaaagagcagggggaatccttgagagaaaaaacaatgcaccctctttggtattccatgaaagcagttagatgcttatactgaggggaatacatcatccttaccagattgttttcaagcaagaagctgggctgacattggcctcacttacccactaaagtaaagttgctctccaaaagctccctatgagtgttaaaccaggcctgtgcaaggcgactgtttttattcttcccaatgatgtaattcatgatataagcaagcagaccagtcaccatcaaaatttctagataataactctcccagctgttctggaggtgtgcaggaacctaaaaaagcaaaatcattccattaaatgttggctgagactgaagaatgaaatctacctcatggcaggaagaatgagaaaatccataaacagaagggatacttcagatatctgtcattgaataaggttatactttgaaaaataggtccattttacttttctaggctagcttgataaaagattctttaaggaaatataaggacaatcaaatgggatgaaaagctggaaagccctttgttttacacttggtccttaacccccaaataaattcaatgtactgtacatcaccaaggaataaattttacttattccctgataagtagtaaaactagaagtgctacaatgatgaataggggttgcttctgtaggtgttgatttttttttttttgagacggagaggtgttgatttttatcagaaaaattgatgtcaagctccttctcagctcccactattgcattaacaccagctatacatcattaattttatttctgggattgatgacaagacattttgttgtttagttgggaattcagaatcctggatacctacatcaacaatcgttattgggtctttatttttgctagaagaagtatctggtttgtcttcataaccttcaaattcttcatcatcatatggttcactctcagtatctccctcctacaaaaatgaggcatcatccgttttcctctacaaatgtcaccagcagctgtgtctcattttgttggcaacatttgttggggaaaacaagaacgtgtaagcagcaagcacagaaaacagatgttacatgtttttaacaaaacgattgggtacaaatttcagcttaaaatgagaaagttctgaagacctaatgtgcagcaaggtgactacagttaataataatgtattgtagacttgaaatctgctaagagaatatattgtaagtattctcaccacacacacacacacacacacacacacacacacacggaggcaactatgttaattagcttgattgtggtaagcacttcatattgtatgtagaggtataccaaaacactatgttgtgcaccttaaatatatacaatttttgtcagttacacctcaataaagctggggagcacccaaaacaccaaaatgatgagtccccatgcttttgatgacaaagttttttcttttctttttttttttggagacaaggtcttgctctatcacccaggctgaagtgcagtggctcaatctcagctcactgcaacctccacctcccaggttcaagcgattctcttggctcagcctcccaagtagctgacatgacaggcacgcaccaccacgcccagctaattttgtatttttagtagagacagggtttcaccatgttggccaggctggtctcaaactcctgaccttgggtgatctgcctgccttggcctcccaaagtgctgggattacaggcatgagccaccgtgcccagccaattgcaaagttctaaataatacaattctcacccacaaacagtatctattctctaacccctcttccagtcagggtttcaatagaagaacacaattcattctgttaatgtaaaaggtggaaacttaccacagaacatttagaagagctctacctagtgaatgaaaatgaagactccagacagtaaaggtctcttgagcctgaggattaattttaatgtttgggaaaggtgctagttacaaatttttccaataaattaataaaaagagcctcacctgggtatctgcatcttcaaaatctccttcttggttttcatcctgcccttccaactccacagtggtctcatcttcatcatcttcagtgattatgacccgttgaggagattcagtaacagagtcttccatgacatcctcaaattcagcgaagtcattatcatcatactctactatgtcctcctcatcctcaaaatcatcaaacttggcttcagagacactcccaaacaccagaaggacaacacagaaagtgtggaaggctttcattgcaccttgagaaaaaaagcttaaaaaaaaagagaaccccaaaatggattgccattctatacatactgatcagattttataaacagtaaaaatctataaacctctcctgcttttctcttatttggtactattagattcagaccacattatataaagaacaatgaagtaaggtcaagaggcttgggttctagtctggatcctggcactacatatctgtaaaatcttcaacaagtcatcaagtcatttatttaatttctttttttttgagacggagttttgctcttgtcgcccaggttggagcacaatggtgtgatcttggctcactgcaacctctgcctcctgggttcaagcgattctcctgcctcagcctcccgagtagctgggattacaggcatgtgccaccacgcctggctaatttttgtatttttagtagagatggggtttcaccatgttggccaggctagttgtgaactcctgacctcagggtgatccatctgtctcggcctcccaaagtgctgggattacaggtgtgagccactgtgcccagcccaagtcatttaatttctttaggttgggttttctaaaactctgtccatttacatagagtattcaataagcattttttgagggcctattaaaaagctttctatagaaaatgagaaggaggtaaaaatgaaggaataagatgtagctatttatctgttagtggtaacaagaataatccatgaataaaaaagccattcacccttagattgatttgtgttcatgcatgaacataattatcataagagcaaacacttaaatcactatgtgctagacactgttccaaagactttacaaaaagcaactaatttaatcctcataacaaccctctaaggaaagctgcaacattaacatccccatttcactaataaggaaaatggggcagagagatgctaagtagtacaactaccaagtgacaaagagctgtgatttaatcccagagttttgcctccagagtccatgctatgaaccacttctcaggctgcatctcaaatgtggtaggtggctgtgctttcatattacttgcttagaagcagtaattttttgctaaccaattgttcttagtgtgtatgatggaattcaatgtatcatcattttatagctttttgaagaacattaagttttctaatacgtgaaaaaagcttctgcattaacaaatataatgatatcatatctgtgacaaaatatgtgccaaattatatgaaaacatggacaacaatgtaaccattttcccaaataggtaaggctttacaaaaaaaaaagtggggagaccatttgagctgaaatttgaaaagtatatttcaaccatcaaacccatttaggctgtatttccagtcctgtccctcatctaaacaccagccctatgtcataactcactgtaaccttgaagacatatctgttttgacgccctacaaacttttcgtgtatctagtaagatagtaaatattctaggcttcatggggtacatactggtctctgctgcatattgttctttttttaaaaaaaactttaaaacaatataaagaccattcttacttcacaggcctcccctcaggctgacccaatccctgcctatagtcatctcaaaatcatcaggtatctgaatttctctattcgtatattaatatcaatcacatttttccagtcttgcttgttgaaaagaacaagatatctaatgttttgccttctttttcctttgaaatctatcagccatcaaatcctggtgtttccttctttgattcctatagccactacaagttacccccacctgctgaagagccaccatattattttaaatggtatcgtcttaatgctctccccactccctacttttcctccctaaaaactaccagcatctgtctaaaacagaacttttgttacatataaggattcaataatcatcaaaggctaaccaattattgcaaagtaatataaaaactcctttggcattcactgcttttcacaatgatcctactgtaattaaatgtaccttcactaagcatatcgccacagtaggtactatgccaagataaagcacaattcctgaactgaacataaatttgcacaggaattcagcttcaaggacatgtgctacaatattatttatgatggtgaaatttggttaaactctttggttaaactatggatgtatcaaaaaccaaagctactgttgtccattaaaaattgttacatagggtggtggctctcccctgtaatcccagcactgtgggagactggggtgagtgaactgctcgagcccaagagttggagaccagccttggcaacatggcgaaaacccacctctacaaacaaaatagaaaaattagctgggtttggtggcatgtgcctgtagtcccagctactcagggcactgaggtgagaaaattgcttgagctcacgaggccggccgaggctgcagtgaactgtgatcatgctaatgcattccagcctgggtgacagtgaaacgtgcctcaaaacaaaacacaaataacaaaagaaaaacccccaagtaattaaaaaaaaattgttacacagcctgggcaacacagtgagacttcccctctacaaaaaagcttttaaaaattagccaagtctcacgctcattcctgtaatcccagcagtttgggaggccaaggtaggcagatcacttgaggtcaggagtttgagaccagcctggccaacatggtaaaatcctgtctctactaaaaatatttaaaaaattagccagcgtgtggcgtgacttgtaatcccagctacttgggaggctgaggtatgagaatcacttgaacctgggaggcagaggttgctgtgagctgagattgtaccactgcactctagcccgggtgacacagggagactctgtctcaaaaaaaaaaaaaaaaaattagccaagtctggtggtgtgcacctgtagtccagctattctggtggctgaggtgggagaatcacctgagcccaggaggttgaggcttcagtgagccatgactgcgccactgcactacagcctgggcaacagagcaaggctgtctaaaagaaaaaaaaaaaacaaaatgttacaaatgaagtcgaaacccagatcattttagaagcaaatgcacataaagaaaaaggtttggctgtgtgcgatggctcacacctgtaatcccagcactttgggaggctgaggtgggcagatcacctgaggtcaggagtttgaggccagcctgaccaacatggtgaaacctcgtctctgctaaaaatacaaaaattagccgggcatggtgacaggcgcctgtaatcccagctacttgggaggctgaggcaggaggatcgcttgaatcaggaggtggaggttgcagtgagccgagacagcgccattgcagtccagcctgggcaacaagagtgaaactccatctcaaaaaaaaaaaaaaagaaaagaaaagaaaagaaaaagaaaacaaaaaagtttaacagggatgtcaaattttttggtttccctgaggcacaacggaagaagaataattgtcttgggccacacataaaatacactaacactaatgatagccaataagctaaaaaatatctcataatgttttaagaaagtttacgaatttgtgttaggccacattcaaagctgtcctgggtcacatgcggcctgcaggccatgggttggacaagcttggtttagaaaaacatacatttacatacaaatattagttagcttgtatggtagaattctggatattttgtctttatttttctttctttttttttttttttttgaggcagagtctcactctgtagcccaggttggagtgtagtggcgtgatctcgggtcactgcaacctctgcctcctgggttcaagcgattcttctgtctcagcctcctgagtagctgggttataggcactcaccatcatgcctggctaattttttttgtagtttaagtacagatggggtttcaccatgttggccaggttggtctcgaactcctgacctcaggtgatccacctgcctcggcctcccaaagtgctgggattacaggcatttacaggcatgagccaccgtgcccggactaatttttttttttctgtagtgtacttttgtcactagagaagaggcattgcagactgcggaacaggtttggcatggaggcctgaaatagcatattttaggagcctggtatgataggacattgggtttgtagactcaagtgggagaaaggaggctggaaaggccctcaggggccaggtcatgatgaaatcattactggcaactgcagggaagtgataaggatggaagccataatgcaagcaattgagtattaacggaagtgagagtatggcaaagggaaatatgtactactctttcaaggtgctctgagatggagaatattctaaatctcatttatagcactgaaacttcttaaagaaatcagtttaatatcgaaggttattgtcgaatgccttgcaatccatggatgctcaagaaattaaatgctcttaaaggctgggcgcagtggctcacacctgtaatcccagcactttgggaggccaatacgggcagatcagcggaggtcaggagttcgagaacagcctggtcaacatggtgaaatcccgtctcgactaaaaataccaaaaaattagccaggcatggtggcacacacctgtaatcccagctacttgggaggctgaggcaggaaaattgcttaaacttgggaggcggagattgcagtgagccaagatcatgccactgcactccagcctgggtgacagagcgagactgtgtcaaaaaaaaaaaaaagaaagaaagaaagaaaggaaggaaggaaggaaggaaggaaggaaggaagaaagaaagaaagaaattaaatgttcttagaattaaagttcataaaatttgaaaggtacaaatgattttgagaaatgccataaaggataggccaacggtacagtaggccctacccatgggttccacatctgtggattcaaccaaccacagatggaacagatttggaggcaagaacagttaaaaaaaaatacaattaaattaggtattataagtaatctagagataattatatagtgtatatacatatacatatataagtatatggtaggaggtgcataggttatacgtaaatactacaccattttatataagggacttgagtatccatggattttggtattctcaaggggtcctggaaccaatcccccatacatatcaagggagaactaaacattctttttatactagttgatccttcaggttagtatcaagggacaatctatgggaaagcatgccactttgtcaatgccagcctcaaagaggtatgggatgtgtctctaaacatccctagcttcctttaaccatctttagttactaatgagtgtttttaaactctggaatgtatattttccacttccactaggcctaagggtcttcagtcctctaaattactacctgttaaagtttctcttctagtttttctaggctttccctctagttctcatgttgtgatatttggtcaaaagtggaagaaatatagaaaacagcacatactttggtgaaattagacttggtttaaaatgtcagctctaggccaggcgtggtggtccacgtctgtaatctcagcactttgggaggccgaggtgggtggatcatttgaggtcaggagttcgagaccagcttggccaaaatagtgaaaccccacctctactaaaaatacaaaaattagccgggcgtggtggcaggcacctgtaatcccagctactcgggacgctgaggcaggagaatcgcttgaacccgagagatggaggttgtagtgagccaagattgcgccactgcactccagcctgggcaacagggtgagactctgtctcaaaaaaatagataaataataaaataaaatgtcagctctaccatttaccagcaatatgaccttagcctaattacttaaaattccctgttctccacatacaaaaaagggataccatttgctacttgcctcttagggctgcagtgggtattacgggagatatgtaccaagggtttttttttttttttttttttgagacggagtctgactctgtcacccaggctggagtgcagtggcacgatctcggctcactgcaagctccgcctcccgggttcacgccattcttctgcctcagcctcccaagtagctgggactacaggcgctcgccaccacgcagggctaattttttgtatttttagtagagacggggtttcactgtgttagccaggatggtctcgatctcctgacctcgtgatccacccgtctcggcctcccaaagtgctgggattacagacgtgggccaccgcgcccagcctccttttcaaatcctactcttaaaacttttttttcatatagaagcaactaaaagttaacaccggaacagtcaactcgattaacagcctgccaaaagatccgatcatttcaaattgaatttccaattagaatattcacaccatagaaacacttctgagataactcagcactataatggagatccttcaaggttatttaggttacaatcatccaagccatttttaccttggttttccctcttagaagtctccgctgcacctgtcagttctcaaatgcacaagtccttgccagaccacccagcctctatgactcctgaagcaagcaacacaggaccaaggaaaattcacacaagcgctaacaagtctggtttgattattttctgcaagctcatccaatagttcctcagcgactgagtctagacttgaggaaagaggactgagtgaggccatcattccttgttgtcattttagattaggtcttcctgacaacggccaaaacgagtattctggaaatcatgcagactttcctctgtctctttatatgtgttggatacaaacacgtttcattttagaaacctccagaagagactggccacagaggtttttgcttctattaaacccctttgcctagtttctccccacccaagagaatcaatacatcctaatgtcatcctccggcacacactgtacatttcctctaactctgcccttttggctatcatttgctcacagctccgtgggaaagttcccccaaaccattacaattatctcaaccggaccgggctacaggccaagcaactcggagtcaccgctcggcctggcccggccacgccgacgagcgcgtcctggcccgctccttacctgtggccgaagccgaaacccggcccagcgccctgcgtccgacacccctgcccggcctgcctctcggcctggccgccgcctccgcgatcgcagcggttttactgccccggatgcctctaggacgcagccagaaccgtagctcagtcacgccgcgcctctcttcacgtagcctccgccgtccgttacgtagaatgcgagcggctcgtcagcgcctgcgcgcagcctgcggggcgggacgcaaccccggggaaagcgcgagacctccctctctcccgcccggctgaggcgaggtggggcttttgggaaaattacataatccccgcccctgggccggaactgccctcgcctatcccaatcctcctacctaggattccgtcaagttgacgtcacacggaaccggtgctccggaagctaaaggtggccatgctgtgtgggaccacgtggccagaggcaagagtgtcgctctagtagtatatgcaacagtttaaactataggcatgttcatgtaaatatggtttctgtccaacccgttttctcttgggatttttggctagccccttgacgccactttttcttcattcgcagacccactttctagatgggtcatgaacactgtccacccaactgcagtttcccgtcagagtatctgaggagcctgtgaggcgttctggagctttaaggtcaggcgccttccgggagccgtagccccggccccgcccttctgcccgcgcgttcctcactgcgcatgtcgcgtttttgttcccctccccccttcagcaacgggccgtgaggcggtggcggtggtggcggtggcggcggcggtggtggtggtggcggcggcggcggcgaagggggcggagaggaaggagcgcggcgggaccgggccgggacagcgcgtactttgggctccgggattcgctccgcgcccgcggttgtagcagctgccgctgcagccatagcagcaggtttgtgcgtggggtttctggacgcaaggccgccagtccttgggggcactggaggcaactgctgggcctagcgagggcggaggaaccgcggcctcgcttaacaaagagtcggcagagcctcggggcaccggcggccggggtgccgggaaggggtgggagtgggggctgaggcctctagggttccttcctagccgcgtcgccctcccacagctcccgcttccctcacaagtcttaccgaggcccagttggcggctttccggaggcggcgccccctcgcctaggaaaaggatttgcagggtgcccggctccagggcaggaatagcgcggggagaattctgacccaaggaggcagcgcttgggagatgcaggcctccgaatttggggtcctgagaggcaaaagctgccaaatgagaggagtgaaaagatataggcgatgatctttgtgcagcgttgagtaggtcgattattagcatcactgtagtcacacaaacttttttgcggcctacttgagagcgtatctgatgtgaataaataatttacatggaattgcaaacatatgcatcaaaaacaggagaagctgtcgagagttttggggaattacattctcatcactgagaatttccctcttgcccccactcctataggcagttatccaatttcttgtggcttccctgtgttttctttttgtcaatgatgtttctatgtctgtcctctctcgtatacacacccaggacttcctcaagcgcagggactatgtcttaaggcgctttgcagagccaagctcatttctggcacataagaggtgagcaatgagtgtttcgtacaaaaattaatgtttatattttgacagctgggaaaagaaaatatatcttcctgtacctggaagaagcattgtgtagcctaatgtgcaattcgttcattcaaggggtatttttattggtgcctattctctagcgccgttctaggtgatagggataggtgttagacccctgcctttggggaacttaactttctagtagcgggaggagaggcaaacagatacatatattatactgaatgttagaagatgatcagtatcttagggaaaagaaagctggaaagggggttggggaggtggtggtgttggaatttgcaataaagtggtcagggaagtccatacagacaagctgatatttaagcggactagaaggtggagtgagagcctacgtttatctggggaaaggaacgttccaagctagagaataacaaacataaaagccttgaggaggacaaagctggcccgttaagagtgtgaagaccaacgcgtttggagcactgtgagctgagggagtattaggagataaggtcagggaagaattgggggaagggagtgagcggaacaaccaaagccttttaggctgttacttaggaaggatctgagggtttcgatcagaggaatgataatatctgatttatattgtaacaatttaatataagagaggagtgcagttatttaaatttgttttgttacattgatagtcatataatcagctcttagttgctttaagctgacaggagaagggatgcttctaaaataaccataacctagcatttacttgtatttggtttagaagaatgtgattacgttcttgagtttttatttagattctcatcaaagaactgacctgtatatagtgtgtgaggtactctcaaagtatatgtagagtagatgctaatcactgtcactagaactcttccttccacctccaaaaatacaagtgataaagtaatgtggcttatataatcagttgtttttagtccactatatttaaagtcatttagatcatatcttattttccgccattgccgaaaacacaaactagctaaattgtcttcctttataagtgtgttccacatttattctcacttcctagcctttgctagttcagtctttctccctggaatgtcttcgtctgcacgtctctacccagctttcatctttctgtgcctagcctggcttctgactctgttatgacacttgcccttgcttgttagctcatggtgatctctgacatcttcagtgttcttgtggcgcttatgtatgaaatacctgagttgaaagaagtctgatagtctcaatttaccgatgaagaaattggttcttcagaaataatgtaataatgaaaaacacgatggtagctgacatattgaacaagtacatttttgtgtatgaacttaatttttcacgccaactcttgagataggtgatagtctcatcttttttttttttttttgagatggtgtctggctgtgttgcccaggctggtcttgaactcctgagctcaagtaatccgcctgcctcagcctcccagagtgctgggattacaggcgtgagccaccacacacagcctcttaccattttttatagatgaggaaactgaacccagagaagctaaataacttccctgaggttcatatcaagttagtagcaaagatagtttacacatagcctgtgctactttactattctgttaagatttcctaggaaaccaccgtgttttatttattttttagagactgtcttgctgtgttgcccaggttggagtgcagtggtccagtcagctcattgtaacctggaactcctgggttcaagcaatcctcttgcctcagcctcctgagcagctaggactacaggcgtgtgccaccatgcctggctaattttttaaatttttttgtaaagacagggttttattgtgttgcccaggctggtctcaaactcgtggccttaagtgatcctcccaccttggcctcccaaagggcgaggattacaggtgtgagccaccttgcccagccagccataggatttagtgcctagaaccataccaaataggacttgatgccatcttgactgtttctcttcagcctagttgtagatctcctttagtcttttacatattgaataaatgagtatctaatattgaaaacatgctataagagaaaagtgaataagcctgtttcttcagccatgaatcctataatacggagttggactggaaagggagtttgaggaaggagatgccatttctttttctttctttttttttttttttgagacggagtctcactctgtcgcccaggctggagtgcagtggcgcgatcttggctcactgcaagctccgtctcccgggttcaagtgattctcctgcctcagcctccggagtagctgggactacaggtgcccaccaccacgcctggctaatttttttgtatctttaatagagatggggtttcagcatgttagccaggattgtctcgatctcctgacttcgtgatccacccgtctcggcctcccaaagtgctgagattacaggcgtgagccaccgtgcccagccaggagatgccatttctttggggatatcatattcatgtctttaggagttggtatttgagatatgctttgaaggataggactttggtaggtactcacagtttataggaaagagatttgatgtgaaggggatccagttagagggaagaggattcactagagtgcttgttttcctggaaaactgagtacgtgtggagagaccctgggaaatatgaatggtaaagtagtttgatgccacaatggagggtctcattccagcatgattaactgtggagagctatggaattgaggagagtgacataatcagaaatgtgtgttctggaagaacctggaaagggttttcgataagcatctgaatactgacctcccttctgtgagactttttctggttccacggtattaacacacactatgctactctaccaaaggaggtaaaacttgcttttctcttttcactgtgtgtctcactattacttcatcattttatgctttactaaacagaatcacttctcatagactatggaagatttgctggttttagatgaagcatctggatgtacatccacattacttttccaataaaacagacattcttgggacagtagtcaggggaggattacctgtcaaatgtcattcatctcagagaggccttgcctgacttaagtctgcaatagcttgcctcttaccctcttgcttgcttttcatagcacttttgctacctggaattacatgatttagtttttctttctcctgggccagactgtgaactctgagtatggctgcatctgattccattactgtatccttagcaccttagagcagttactggcacaaaataggcactcagtatattttgacttagtgatcactctagtagtgctgtgagagcttgataataaagttttttttttttttaagacagcatctcgctctgttatccaggctggagtgcagtggcacgatctcggctcactgcagcctccgtgtcctgggttcaagagattctcctgcctcagcctcctaagtagctggaactatgggtgcgcgccatcacgcctggctaatttttgtatttttagtagagatggggtttcaccatgttggccaggatggtcttgatctcctgaccttgtgatccgtccacctcggcctcccaataatcagaaatttttttttaggaaataattgcaatagtggaggtggagatggaaaggcgggtatacgtgagggatgtccctcatagtactgggcacataacaaaatcatcagtggttattggtcagtataaaacaatggatgttattactaagaaccacttagggttgttcttttttaaacaaatactcattaaactttgtttatggctctattcagctaattcttttcaaattaggtatttcaaaagggttcttttttaaatttttattttttggcaccccagcaggaaatgaagaaatcttttttaagagaaaaaatacaaaaatgcagttgaatttccccaagtgtgttttttttgtttgttttggttttgtttttttgagacgcagtctcactctgtcacccaggctggagtgcattggcatgatctcggcccactgcaacctccgactcctgggttcaggccatcctcccacctcaacctcccgagtagctggggctacaggtgcacaccaccacacctgggtaatttttgtattttttgtagaaatcaggtctttcattgttgtccaggctgacctctaactcctgagctcgagccatcctcctgccttggcttcccaaagtgctgggactgcagttgtgagccactgtgcccacctcattttgttttcttcttttggtactatcaccacaatctagccacaggacacttttcatcttgtaaaactgaaattctgtacccattaaacaataacaccctattctcccctcctcgcagcccctggcaaccactcttctactctgtgtctctgagtttgactattctaggtatctcttttttttttctttttgttttctttgtagagatggggtctcgctgtgttgcccaggctggtctcaaactcctggcctcaagccatcctcctgcttcccagagtactgggaatataggcgtaagccactgcatctgcctcttttatttttttagtaaccaaatagaaatttgggtggctatcttttgcttcttctgtcagctatactcccacaaatctctgtgattgtcaaggttcagtaaccatatacactacatggtttaatagtaggaaaaactgccgggcacggtggctcacgcctgtaatcccagcactttgggaggccaaggcaggcagatcaccggcggtcgggagtttgagaccagcctgaccaacatggagaaaccccatctctcctaaaaatacaaaattagccaggcgtggtggcacatgcctgtaattccagctacttgggaggctgaggcaggagaatcacttcaacctgggaggcggaggttgtggtgagctgagattgcgccattgcactccagcctgggcaacaagagcgaaactgtctcaaaaaaacaaaaaaaaaaaaaagtaggaaaaactgttgtcaagagacttaagtaatgatccattgaggatgatctggcttagatttaatcaggaagggtggttagctagataacaaggtttgtagtaataaaatagagttttcataaatactgggatgaattttggagagcctgaatacattacatttattcatacagcaaaattttttgagtactatgcagacaccaaggatatagtgctggacaaattgagtcaagtctatgccctcatagagctaacattctactcagggtatatagaaagcacagttccttggccttcctagagtcagtaattgagggacaatgagctgtgtgttctagatgagctagggaaaggatcgcttttccaacttgctaagtcttgagagccagtaagcaaccctcacctgcccaaggtctcactgcctgcctgtttgtggcaggagttgatttgctgcttttgtaatatgaaccttttgattatttaatagggctgattcatagtcatgtttgttcttttcactccttccctctagctttgggggaagagtgagttactcctgttgttaaaagttttgattgtgtctggtcttctctggaaatcctatgacttttttctgtcattttgcatcttcagtttttcagactttactggtttttcccctttagcatataaacatgcctatgtttctttaaaaaataaaatttctgtaggtaatgcttcactttctccttcctatcattgataaacagcctacaaagtactcttgactcctcttgacctagtcttcatcttctactacttacttgccaggtactcctcaaccctgtccctactgctccattgaaactgctttcactgatgactcctggttgcctatacaacagaagaattttagttctttttgttttgtttttttgagacagagtctcgcactctcgcccaggctggagtgtagtagccggatcttggctcaccgcaagctctacctcccaggttcatgcctttctcctgcctcagcctcctgagtagccggaactacaggtgcccgccaccacgtccggctaattttttgtatttttagtagagatggggtttcaccgtgttagccaggatggtcttgatctcctgaccttgtgatccgcctgccttggcctcccaaagtgctgggattacaggcgtgagccaccgtgcctggcacattttagttcttaacttacctaacttctctttagttttctgcctatagagcttctttctcctcacccgtgttcctccttgtctccccttccttctttccccctcttctttctttcccttccccaatccctgttccatctgaagtttccatgtaagcttctctttttctgcccattcctaaatagtgatatatgttaagaattgtcttactgggccggatgtggtggctcacgcctgtaatcctagcactttgggaggccgaggcaggtggatcacgaggccaggagatcgagaccatcctggctaacatggtgaaaccccgtctctactaaaaatacaaaaaattagccgggcctggtggcaggtgcctgtagtcccagctactggggaggctgaggcaggagaatggtgtgaacccgggaggcagagcttgcagtgagccgagattgtgccactgcactccagcctgggcgacagagtgagactccgtctcaaaaaataaaaataaaaaaagaattgtcttaccagctgggcgcagtggatcacgaggtcaggagtttgagaccagcctggccaacatggtgaaacctgtctctactaaaaatacaaaaattagctgggcacggtggtgcgtgcttgtaatcccagctactcgggaggctgaggcaggagaattgcttgaactcaggaggcggaggttgcagtgagccaagatcatgccattgccctccagctctgggcgacagagcaagactccgtcttggggagaaaagaaagaattgtcttacttcttttctcactctgcatggtctctctgctagcttatttacatcagtaacctcaaatgcaaatggcttacatcaaatctatagctcactccggacccctctctgcagttactgcccctgcttggcatctctactcagctctctcatagatactgaactcaccttttgcctaattttgcaaacctggctcttttaggtttccatctccattagtggctccacagttcacccagtctttaaagccagaaacttctgaagttattctagactcttcttccttagcttccacaccaattactggtcacacaatcctaattgatctttcctcagatatctaaataaataactcagatccatcccccgtttctcctttcccacaggtgctttcttagttcagaattttgtcgctttatacctgcgttgctgcaacagccttctactttccttgcctctaccatgagtatctctcattctgtctttcaaaaacactgatctgaaaatttcccttctgtgtaaaattaacgattctttgtagctggcagaatacagttttgtatggtacgtcgttagcatagccttctaagctgttcatcttggccctacctgtctttctgaacatgtgtcctgcaaatttcccaaatgtgctactgaactctagctgcactgaactatttcttgttctctgtggtaacacttaacagatccttccatctgaaatgcccttctttaatgcctctttgatctaatgcctcttgaggtttcaaaatttaacatgtcatctctcagaacacttctatgcctttgctcccactcatggaccaccagtgaatgcactctgtatagtacgtctgttagaacgcatcatgttgttttcagctgcctcagactgcactgtctactccttgagaacagggactgtatctttcatgtatgaatgcctagcacatcatataccacctgaccttctcagcaagctttcagtaaaccattgaaagttttcctgctaggagattgtgtgattcttaaaatccacctgaacgtaaatgtctttccactatcctttctttgccttctcatccttatggcttattagctccttgttatacattgtatacactaggaaaaatgagattaaaattgagcccatcctttttgttgcttgggaacacctcttgtaaagatagcttatagattagtttaaaaacgtcagatgctgaaattttcttgcttgtaaagattcttactaaatttcatcacactggaattacgttgattccttgattgaaggaatccccttatgggattccgaaagacagcaggagatgaagttcaggtaaattagtacttactaaatacataccttagtcattctcactgttagagaaggaagtccaaaatgagtaaagacagtttctatctggagttaagggtctaagtagagattgatgtagtgtaattcaagtttaatactaagcagcctgggtgccgtggctcacacctgtaatcccagcacttcgggaggccaaggtggttggattgattgaggtcgggagtacaagaccagcctgcctaacataacgaaaccccatctctactaaaaatacaaaaaattagctgagcctggtggcacacgcctgtaatcccagctactcgggaggctgagacaggataatcacttgaaccatggaggcagaggttgcagtgagctaagattgtaccactgcactccagcctgggaggcagagtgaaactctgtctcccaaaaaaacaaacagacaaacaaaaaccttaaaactaagcaaacaactaagtgctgtgtataatagcagttgaacaaaacctatgaagtatatatagacaaggggtatagaacagtgcatgtttctgatctcttcgacaatgttactataataaacagtttttggaatttttttccaccctggcttcaaagctagtggaaattaaaattaaagtaaacattttaatttttcttactaatggtaaacaaaataaaaatcaaatagctgctgttaacattttgataaacagcctgtcagctgtctctgtatatataactcatggtttttacataaattaaatcatactacccaccttgttttatgcccttattttactcaatgtgtaatggatactttttcataaatgtaagtagtagttaaaatttttaggccaggcaaggtggtgtgagtcatgtctgttaattccagcactttgggagactgaggtgggaggactggttgaggccaggatttcgagaccagcctaggcaacatagtgagaccacaaaaaattaaaataaaaacccaggcatggtggctcatgtttgtagttccagctactcaggaggctgaggtgggaggatcacttgagcccaggagttcatggctgcagtgagctgcaatcagaccactgtaatgcagcctgggtgacagcaagaacttgtcttaaaaaaagatttttttttttaactcagaatgcattttcctttgagcagttgcattttaaaacttgttcctaaggaaataattgaaggtatgcacaaagatgtagctataatgatgtgttttgcaacattgtgttaccagtattatactgtcaagtagtgaagaaatagatatctattgacattaaacaatatcacagtatatcattaggtgaagaaatcactaagacaatatgtacagtatggtttcaatttttaatttgtgtgtatatacacatatgcatacaagtagcaaaaaatagaacaaaactacatatctgggagaggaaatttcaggtagttttaaattttgttcttttttgctttctgcttttctgtaaaacttaggtaagttgtatcattaaaaagggttttggggggccaggtgcaggggctcatgcctgtaatcccagcactttgggaggctgaggtgggtggatcacttgaggccaggagttccagaccagcccatctctactaaaaatacaaaatattagctggatgtggtggtgcacacttgtaatcccagctacccaggaggctgaggcatgagaatcacttgaacccaggcgacagaggttgcagcaagccgagattgggccactgcactccagcctgggtgacagatcaaggctctgtctcaaaaaacaaaaaacaaaaaaattttttttgggccaggtgcagtggctcatgcctgtaatcccagcacttagggaggcagatgtgagaggggggggtctcttgaggctagaagtttgagaccagcctggacaacatcacaagaccctgttccttaaaaaaaaaaaaaaaagaaagaaaaggtttttggagccaagactaatgtaaggtattgtttgtaaattgattttatgaatgcacaagaaatttctttgtaactcttaaccacaggctaactgaatacttcaggcaacatgtcagtgaatcatagtttcttcctggatagtgtttctattgggcagttgttcaataaatacatggttcatagtacctttcctgcagacatgaatacatagatactgtctacaaacaactgatcttttaagttttgattctttgattcttccagatgtcattaccagaggataacctctagttttcggagagtcttggctgatagcagctcagtctttcatataaggatgaagatatttagtcttttcatatctccagtggccttgcacatatcagattccccaaaatatttctttttatgagtatttttgtcagcttaataagatgttaattagcaggcaaatccttttggaggggatgatattaaatactgcattctggtttatactgagatcccaataaaattaaaacaatttcttcagtgttttagaaaatataatcatttgttgaggctagcatggtgtgtatctgaaatacaatgtcaacttttgtgggttttgtttttgtttttttaagagacaggatttcactatgttgcccaggctggaatacagtggctattcacaggcaggatcatagcacactgtaaccttgaactcctgggctcaagcagtttacctgcctcagcctcctgaatagctgggctggaaatgaatctcttaatgagatggattttcttttcttgtcttttcttttttaatgtaaaaagagacaatctctgtcacccaggcttgagtgcagtggcgtgatcatagctcagtgtaatctggaactcctgggttcaagtagtcttcctgcctaagcctcccaagtagttggcattactggcctgggccactctcctgactacagtgttatagttttaattgagaagctaaaatttaaaataaaattttaggtggaggttggaagagacatacaactcagtggggctatatacttcttttttgtttttgagacggagtctcgctgtgtcgcccaggctggagtgcagtggcacgatctcagctcactgcaacctccgcctctcagattcaagtgattcttatgcctcagcctcccaagtagctgggaccacaggcatgtgccaccacgcccggccaatttttgtatttttagtagagaagggttttcaccatattggccaggctggtcttgaactcctgacctcatggtccacctgccttggcctcccaaagtgctgggattacaggcgtgacccaccgcgcccggcccttggggctatacacttttttaagtttaatttatatttgtgtatcttattcctaacaggtcagtcattggcaccatgaactggaataaaggtggtcctggcactaagcgaggatttggctttggaggttttgccatcagtgctgggaaaaaggaggaacccaaactcccacagcagtcccacagtgcctttggggcaaccagctcttcttctggatttggaaagtcagctccaccacagcttccttctttctacaaaattggatctaagcgggccaactttgatgaagaaaatgcgtaagtggtaattcctggtagtgtagcaaagtttggactttgatatattcattctatcagcagaaattgaggcaaagaaactttgtttctcaaataataatgaattcttaaattatgtgtctcgctgaattccattgttcctaataagttaaattatcaggtttactcatttgtaaggaatgtaatacctgtggtgttacttatacctttactcattcagtgttacgtcctactgggctgttgctcactgtgggattagaagccattgaaacaggctgggcgtggtagctgggcgtggtggctcacacctgtaatcccagcactctgggaggccgagacggatggatcatctgacgtcaggagtttgagaacagcctggccaatatggtgaaaccctgtctactaaaaatacaaaacattagccaggcgtggtggtgcacgcctataatcccaactactcaggaggaggctgaggcaggagaatcgcttgaacccgggaggcacaggttgcagtgagccaagatggtgccattgcactccaacctgggcgacagagcaagactcccatctcagaaaaaaaccaaaaagccattgaaacataaatatggctgaagagttttatataattcatgtggtttttttttttttttttggaggcagagttttgctcgtcacccaggctggagtataatggtgcaatctcggttcaccgcaacttcaacctctcgagttcaagtgattctccagcctcaccctcctgtgtaggtgggattacaggcatgcaccaccatgctgggctaatttttgtattattagtagagatggggtttcaccatgttggccaggctggtctcaaactcctgacctcaggtgaactgcccgccttggcctcccaaagtgctgggattacatgcatgagctactgcacctggcctggtggtctttactgcagtcttttactgacaccatataaattgtttagtaaacacaggccgttgtcagaactgatggaaatacaagtttgcttcaacatctgagtcttttttttttttttttttgagatggagtctctctcacccaggctggaatgcagtagcgcgatcttggctcactgcaacctccgcctcccaggttcaagtgattctcctgcctcagcctcccaagtaactaggactacaggcacgtgccaccatgcccagctaattttttgtatttttagtacagacggggtttcaccgtgttagccacaatggtctcaatctcctgacctcatgatccgcccgcctcagcctcccaaactgctaggattatacaggcgtgagccactgggcccgggctacatctaagtcttcaaaactagtatgttggaacgtctgatagtggtagaaaaatctactcacatttttcccatagttctcataattggtaaatgctttttaccaattaccgtttttaacttgctgatataataatgtggttagaaaaggctgggatttaaggggttgagttctaatttctatacaaaatatctctctttgctgaatctgaagaaatctcttgttgctattatttccaagctgattgtgacactgcttcactgcttgaggttttttttgttttgttttgtttttgttgttgttttgagatagggtctcactctgtcacccaggctggagtggagtggtgcgatcaaggctcactgcagtctcgacctcccaggctaaagcagttaagcagttctcccacctcagcctcctgagtagctaggaccataggcacatgccaccataccctgctaattttttattcttttttttttcttttttgagatggagtctcactgtctcacccaggctagagtgcagtggcgtgatctaggctcacagcaacctccacttcctgggttcaagtgattctcacgcctcagcctcccatgtagctgggattacaggtgcctgccaccacacccagctgatttttgtatttttagtagaaacgcggtttcaccaggttggccaggctggcctcgaactcctgacctcaggtgatccacccgcctcagcctcccaaaatgctggaattaaaggcctgagccaccatgcctggccaattttttattcttttgtagagacagggtcttgctttgttgcccgggctggtctgaaactcctgggctcaagtgatcctcccgccttggcctcccaaagtgctgggattataggcgtgagctactgcacccagcagatgttaattggaaaaaaaagcttctaaaagacttttttgtttttgtttttgtttttgtttttttttttttttttttgagacagagtttcgctcttgttgcccaggctggagtgcagtggcgtgatctaggctcacagcaacctctgcctcctgggttcaagcaattctcctgtctcagcctccttagtagctgggattacagacatgtgccaccacgcctggctaattttgtatttttagtagagacagggattctccgtgttggccaggctggtttcaaactcgtaacctcaggtgatctgcctgcctcggcctcccaaagtgctgggattacaagcatgagccactgcacctggccaaaatattttgaaagtacacagtaatattttagaaagctgacatgttatttaggagtcaaatatacaagtagtgtttaagttttagcaaagtcagagatcattattctaaacagcagttaaccagttcaggctactttttcattagttaaatagaacacactatatacaggaggcagaggtggaaagactgcttgagcccaggagtctgagctgcagatagctatgtttgcatcactgcacatcagcctgtatgtcagagtgagactctgtctctaaaaaaacaaacaaaaaactaaaaacctactatatgaatgaatatgcatgagtaaatatgtgtatatatgtatgctatatattgcatatatattgcatcgtatagtatatagcgtgagtatgctattgctacattagtatacataacagttactatataaaggagttggcataagcatatagactatatattttaggccaggcacaatcgctcacgtctgtaatcccagcactttgggaggccgaggtgggtgtatcacttgaggtcagaagtttgagaccagcctggacaacatggtgaaaccccgtctctactaaaaatacaaaaattggtctgggcatggtggctcaaacctgtaatcccagcactttggaaggccgaggcgggcggatcgcctgaagtcaggagttagagaccagcctggacaacgtggcaaaaccccatctctactaaaaatacaaaaattagctgggtgtggtggcggcgcatataatcccagctacttgggaggctgaggcaggagaatcactggaacctgggaggcagaggctgcactgagttgagatcgtgccactgcactccagcctgggcgacagagcaagactccatctcaaaaacaaaaagaccacaaaaattaactgggtgcagtggcgtgcacctgtaatgccagctatttgggagactgaggcaggagaattgcttgaacctgggtggtggaggttgcagtgagcacagagatcacgccgctgcactgcagcctgggcgacagggcgaggctgtctcaaaaacaaaaaagcatatatactatatagtttagcctatattattgttacatatagtcagtgttacattagtgtgtatatatatgtatgcatgtgtgtatatagcataacagttaaagcttttaaaataattcctaggaagacttgaaatgctttaactttttaaactgcagttatttatttaaattaatatttggttatattactatttgagtttgagattaaagtctaaacagtggtttagtttataaagagctgtattgacatccttttctgaaatgtttgttaaagagaaagtgataccttatccagcctttgaagatgtcctttctgaatacttaagtagtatcttaaattattttggattgagcatttattttcttgcttttttcctcgttttttgagagagtcttgctctgtcacccaggctggagtgcagtggcacaatctcagttcactgcaacctccacctcctgggttcaagcagttctcttgcctcagcctcccgagtagctgggattacgggcatgtgcaaccatgcctggctaattttgtatttttagtagacacagggtttcaccatgttggctgggctggtctcaaactcttgacatcaagtgatgcacctgtctcggcctcccaaagtgctgggattagaggtgtgagccaccacgcctggcctgaacatttattttcaattccggaagttttctgttggtccccagaaaatagcccagaatttctgaggtttttggtcttaaaagaatatctcaagtttttattaagggttataaagaataaactggatttctaatgtttcagtaagtttccttttggctgtgcacagtggctctcgcctgtaatctcagtactttggaggctgaggagggcagatcacgtaaggtaaggagttcgagaccagcctggccaacatggtgaaacccctgtctctactaaaaatacaaaaattagccaggcatggtggcaggtgcctgtgatcccagctactagggagggcaaggcaggagaatagcttgaacccagaaggcgggggttgcagggagcccagattgtgccactgcactccagcctgggcgatgaggaaaaccccgtctcaaaaaaaaaaaaaagttttcttttttcccatagcacagctctttaatatttgtcatatttatctaacaatggtcagtaagtttgtactgaaaactcttcccttttaacagaactgggagcatgatttgactatacactattgaaatggagaatctcttgtgattacttttttgtaatattgaaattttgcatgtattaagtagtacttaataattaggtcattagccaaagccttggaggtctctaatttgatctgcattacatctcctaataataagatataccataataaaaatgttgttaaatgaaagatttactgaccccaaagtaagcattcactttaccagtttgctttctaattctcagctattttgaagatgaggaagaagattctagcaacgttgatttaccttacattcctgctgaaaactcaccaactcgccagcaattccattccaagccagtagattctgacagcgatgatgatcccttggaggcattcatggctgaagtggaggcaagtatcaacatgtttcattaaaatatttagcagttagaaatagatcaagttaacttagtacttcaaatcttattcaaaatttgttttctagtcttattatttttttttttttgagaattttgctccagtagtctatagttgcatatatctacttccacttgccctgtagtacttttgcaatgattggtggctagaaatttgaactgtaacccatgaacatggtagctctagacgtatatgtgtgtatgtattttattttaataatcttagcatattcttaaatggaattaatattcaatctagcatttgttaagtacatatttatgtaaggtaattaaacttaaggaacttgccaaaattataaattctgtattctgtagttttaaatgttatttcttcatcaacattcatgacctccctgtagaaatttaacctcatgaccacctccttgaaactcttctcactaggcttttgtgattttgtgttattttcctttttcatctttctgttttctgtttgtttttgttttcttgctatttttattgtggaaaaatttaaacacatacaaagatagaataataaaatgaaccttcatgtacctttaaccaactttattagttaacaacttttggccactcttgttttatccaatctctcccacctctgattctttcttttcctttctctttttttttttctttctttcttttatttttttgagacaaagtcttgctctgatgtgggctggctagagtgtagtagtatgatcatggctcactgcagcctcaaactcctgggctcaaatgatcctcctgcctcagcctcctgaatagctgagattgcaggtgtgcaccaccatacccagctaatttttaaagtttttatagaggtgaggtcttgctttgttaaccaggctggttttgaacttctagcctcaagtgatcctctagcctcagcctcccaaagcgcttggaccacaggcataagccactgtgcccaatccaattctgttttggattattttaaaatctcagacatataattttatccatcagtatttctctgagaacactcttacaaattacaaccaccatgttattgtcgcacccaaaaaacaaatcattaaatatccatctgttatttgtgatccttcttgccatcttcctccaatttttcacatacagaggtccttttacagctctctatattgattattatatagcagatcattaagaatgttcattatttaatttaatcctcaaaataatggtgggaaataggcagaaaaatttatatatatatatatatatatataattttttaactgataacaaaaccgagacccaagataattcaaatcacttgccccaaatcatattggtacttaatgtggcagacctggaactcaaatctaatttcgcttgcttagtagtcctgaaggtctagctgtttcccatacatcatgctgcctttcctcttctcattggccaaaatctgtcaatctttataatagcccttgcatttgttctttcctttctgttgccattgtagccatcctactttacactctcgtaaattctctccctgctttaggctctctgctgtcttattaggtagtatacagctacaggttaattagaccaaaatatgtttcttttcatgttattctccatacttaaaaactgtcactttagatggctggacatggtggctcatacctataatcccagcatttcgggaggctgaggcaggaggatccctcgagtctaggagttcaagatcagcctaggcagcatagcgagtccctgtctctacaaaaaataaaatttagccaggcgtggtggcatgctgctgtagttccagctacttgagaggctgaggttgtagtgagccatgatcatgccactactcagcctggatgacaaagtgagaccctttctcaacaaaatgaaaccaaaaactatcactttagactatgtgccgtagctcacacctataacccccagtattttgcagggccaaggtgggagaattgcttgaggttgggcagcatagtgagaccctgtctataaaaaaaaaaaaaaatttggccgggcacagtggctcacggctcacatttgtaatcccagcactttgggaggccgaggtgggctgatcaacagtttgagaccagcctggccaacatggtgaaactccatctctactaaaaatacaaaaaaaattagccaggcatggtggtgcatgcctgtaattcctgctactcgggaggctgaggcaggagaatcgcttgaacctgggaggcagaggttatagtgaaccgagatggcgccattgcactccagcctgggcaatagagtgagactccatcttaaaaaaaaaaaaaaaaagaaaaattgtcacttaattagttatgaaataaaatcctttcggattccttagttacttgtcttcagccagaatacacctctcctccaaggaagtagggaaagaaataatccaagattaatgtgtttttgtttggcctagacattgcttttttaaaatgtgagccaacatttttagtatcaggggatcttgtctaatagttcagactgttgaaaaaaggaagatctggcaatatactaagtctgtgtttttgtgtggcagaaagaggctattgctgagcaaatggctgcctacattagacaaggcatgcttttccttgctcaccatagttacatcaatccctgttttcttcttaaccttgaggccactgtttatagcaccatttgtcatttctcttgcactgtaatttttttcttttgagacaggatctctcgcccaagccagagtgcagtggcaccattacagtcactgtaacctcaaattcctaggctcaagtgatcctcctgcctcagcctcccaagtagctggaactacaggtgcacggcaccacaccaccacacttggctaatttttagaaaatattttttcccaggccggtctcaaactcgtagcctcaggcagtctctccaccttggcctctcagagtgctggaattgcaggtgtgggtctgtgcccagcctctgtattgtaatttttcttagggtggagaattatttttctgaacttagttctctatcagatatcagaaaacaaaagactcagggtgatgtaagaaaaattagagtacatttctgtagaagaatatgcctacttatttccagtttggtctttgaatttgccatctttgatttataacaacttaagttacttactgaagaatatacacctaataggtggcagagccaaaattcacctccaaaccccatattccttatgcagtatcattctgtatctgagttcttatagtgttgtgtatttctgccacttacaaactatacaggatacttaccaaacacccagactattcagggtatacgtgtgtcttgcagcatagtaggtatttagttaatatgttaagtgatttaccctaggagtaaaggcaataaatgaattgtcatctttgagatgtcttgtatgcgttgttttcttcatcttcttgagatacgaacatttcctaatgggctatgtttcctagagaatctggtctcgttatttcttgagggatccctagtgatgaattaaaagaaaaattagctctgattttctgggtttaaatgtagatttatggtagtacaaactggcatagccctttctgagtgacagtatccgagaataggctaaattcttttgcttggccttttttctttttggagggaggaatggagcttcacccttgttgcccaggctggaatgcaatggctcagtctcagctcaccacaacctctgcctcccgggtcccgggttcaagcgattctcctgcctcagcttcccgagtagctgagattacaggcatgtgccaccatgcttggctaattttgtatttttagtagagacagggtttctccatattggtcaggctgccctcgaactcctgacctcaggtgatctgcccgccttggcctcccaaggtgctgggattacgggcgtgagccaccgcacccggcccagatgtcaaattttatagaaagtataaacttttctagtgcttgaactagatgaagatttatttttagccagtgttctgaaaaaggatttatgtaggcttaaacaatatgttctaccacttttggtgacctgtttcttatgttacattgcttatgtcatcttcagtttatagtcttaaatatatcttatagctggttcagtcctccgaaaagtaggttgtttgtatgcattgcttctctttaaaacaatttctcttcatcaggaacatttggtttgatagaacacccgatcatgccacagtatatatagtggcatttttaaaaatctgagattgccagaaaaactcacggtgctttatagtgagaaaaagttgtgcagaatgtgtataaagccttgggaaaaatcatttaactcttctgaccttgattttcaaatgtataatgcaaatgattaattttgatcagtgatcatcaatttgcagtatataaaaattgcctaggccgggcgcggtggatcacctgaggtcacgagctcgagaccagcctgaccaacatggagaaaccccgtctctactaaaaatacaaaattagctggatgtggtggctcatacctgtaatcccagcttactcaggaggctgaggcaggagaatcgcttgaacctgggaggaggaggttgtggtgagccaagatggtgccattgcactccagcctgggcaacgagagcgaaactccatctcaaaaaaaaaaaaaaaaaagaattgcctatgaaaaatgtaaaaactacacacatttaactcactccagccccaaggattctgatttagtagatgtagaacagaattttcagccttgagactactgtcatttggcgctggataattatttgttgtggggctttcctgtgtattgtagaatgtttagtagccatcctccgcctctagaaaccagtactatcagctgtaccacccccaaaattaaaaatgtctccagacattgccagatgttgcctaggggcaaaattgtcccagattgagagcaacctttccagagtcagatgtatgtggtcttaagctatactttgaggaaggcctatctgcctgaattgaaagcactttatatctgtaattttatcattaacttaaagcaacttaaggttatgtatttgtgaagcaagcatttttgttcatttttccatgtgtggcacattattacagataaaattgtgcagtccatatacagccaatttatacagcatttagttatttctctttgaaaaataattgtcaaaatgcaatttgatggcatcaaaatgcacttgtcaaatacatagctaaagctattatggcacttgttccaatctaaaaattgtttctttcagtgtttttagttgatgtcattctatacagccttttgtttcattaggatcaggcagctagagacatgaagaggcttgaagaaaaggacaaggaaagaaaaaacgtaaagtaagttgttttcttctccctcacaaaggttacgtgaaaactgctgaagtattgcaaagtctattcccccaaagtttatagagaaaaaatattgacgtacacttgtgtactttacttgaagttattcctgtatcttgaatactttaagaatagagatggcaacagtctttgcatttgcaataattaaaaagcattcagtttggtagaatagtatttggtctttgactataaatagttgtttagtaaacacaaggaatgaattatagtagagtttaggggagcataattattaaagtttaggctcattgttctgagtttgtcgcataattaatataaaataggtttatgcctatatggttgattatgagaagtaatggcaactgtatcatgaaaactatgtatagttgaacctttgaacaacacaggtttgaactgcgtgagtccactcatggggatttttttcaaccaacacaggtggaaaaataatattcacagtataaaaacctgtgtataaggagggctgtaataatacctaattttatttagctccagagtgacattgtgctgtagcagccatagtcagaacttgaagtactttattttctgggaaagagaagtctctttgccttgatgaataaactcctaaggctttttctgccagtcatgattggacttttttctccctgtgcttggcagtcagtgcttcagtcctttaccagggtttctgttccatatggagatttagctgtggttttggtattcactgtatgtcatatccccttccacctgccctgcactggtggtgttgcttgccggttgccttaggaatagcaagcgctctaggttaggcagaaagtctgattagaaacagatggttgtgggaactaagcaaccatattttctctatagctcctgagacatacagcaagtggtgatggtccccttctccatgtgaactgtttaagcgttttattcccaaactcataaaggagttaatgtagttttcactctgtccccatccctaaggtaactgcttttggctgaaaaccatttaccctagagctagaaactttggggacaataagaaggttgtgacctttctagtatatgccaaatacaagattttttttttctttttagtatgaaatacttttcacaaccgcattgtttgttgtatggattcacaaaactaggaccatttggtatctgtcttcagaaagtttttacgtctgatatccttgttggtaaccgctgtttctaggggtatcatatcatcccatttaaaagaaatgcaaactgcagattatagagtgcagctacacatatatataatggggtggatagtttatagtgtgctcattgctgctttgttattattagtgttgagagttcctgtgctgtgtggaattcaacactaatctgctgtaagtatggagctgggtatgtggaacatttgcagggaagtttgtttctccgcttgtttttccaggggtattcgagatgacattgaagaggaagatgaccaagtgagttcctatgcagtatttctatcttttatttttatccacaaagtctatactggggacaagctagagcttgccttcactcaaaatggccattcctgacattcagcagggaatgtcatttgatttgctccttttgtacctgtgtgaccaattggtaatacatagattcacatggctttcccccatattgaagatggaatttttgatcaactgtgacatccaaagcaaatacgagctttattcagcttgcttctttttaaatccaaaattaatgtttattctgataaatcaagtggtagagtagtgtgggatctattgatggcctctggtaacatctaacctctgtctcttagtaagtgtcctgtttgtggttcttgtatttcaagctggaacattaattactgtccattagtctcttttcccccattgttcagttgtggagtgatgagaatcagagtgagtggtagccgtttccaggtttgtgacctttctaattagcgttaacttccaaacttggattgttaaagccacagcatgtgttctatggctctgggcagggttgatagacaccccactccaggaaggctgtggaacagacagatttgtaagtcttctattaaacaagttgcaacatttaatagtactaactgtttaattcatttcttctgattgttcttctgaatattgctattattaaaggaatcattgctagtaaggatcttgccttacttggtaggtatgttaactgtgcaattatctggtacactatgtgcgctaattacaggagcagaaacattctcaattgtacttgggtgtgattatgttcttgtgctttcctgcaggaagcttattttcgatacatggcagaaaacccaactgctggtgtggttcaggaggaagaggaagacaatctagaatatgatagtgacggaaatccaattgcacctaccaaaaaaatcattgatcctcttccccccattgatcattcagaggtatggtgtttcttgctgaattttactcttgtttcaagctgatgctttacttcagctttaacatttagattttctcagtagtggaatactcttacatcatgagcgtatgcatcttgtcatctctactaagtggttgagccacaaattccatgaggctttatagcctgttttgttcaaaagtataaccaaatcacttacatttgactttagaattaaaacatttttttcaagtaattgtacttgttttccagaaccaatatttctttcttttctttctttctctttctttcttttctttccttccttcctttctttcttttctttccttccttcctttctttctttttcttttcttctttctttctccctttctctttcctttttttcctctctttcttctttctttcttctcttctctttcttctcttttattttctttcttctttttctctctctctctgtctctctgtcacccaggctggagtgcagtggcacagtcttggctctctgcaacgctgactcctgggttcaagcaattctgcctgcctcagcctcctgggtaactgggattacaggtgcccactaccatgcctggctaattttttttaaatatttttggtagagatggggttttgccatgttggccaggctggtcttgagctcctgacctcaggtgatccccctgcctcggcctcccaaagcgctgggattacaggcgtgagccaccgcacccagccttgacatctttctttcaaactgggaacgttttggcctgtgtttactgtttttgttgttgttgctatattgcccagactggccccaaatcccctggctcaagtgatcctttcacttcagcctcctgagtagctgggactacaggtgcacaccactgtacctggcatgcctttatttttttgtttattttttttccagacgaagtcttgctctattgcccaggctggagtgcagtggcgcaatcttggcttactgcagcctctgcttcccaggttcatttttagtagagatgggattttaccacgttggccaggctggtctcgaactcctgaccccaagtgatccacccaccttggtctcccaaagtgctgggattacagatgtgagccactgcatccggtcacatttgtttttttaattgctataaatttttactgttggtcctagatctggggcagatgagaggctgtttcttcacagtggagccagtaattacaggatccttaaggaatgaggacatcggtatacccacttgaaaaaatatcagtgtttcatccaggttaaatatcagccgagatctcacatacactaatgattctagatctggagcagtggttctcagtgtggaccaagaacccctttcagggagcctacagagtccaaacacttttcattataccaagattgttttcctttgttactgcatcaacatttacattgttggtgtaaaagcagtgataagtaaaactgctgatgccttagcatgaatcaagccagtggcaccaaactgttctagtaggcgtattctctgttctcagaccattgcagttaaaaagaaaaaaaaaggccagtttcactcaagaatgccctgaacagtaaaaattattaaagtcgtgacccttgagctacatgtctttttattctgtgtgataaaatgggaagtacgcataaagcatttctgttgcataccaaaatatgatagccatttcaaggaaaagcacttatgtgtttgagttgtaaggtgaactagctactttttttcatagaacaccactttcactggacaaaatcaatgacatttcaaggaaaacaattgaaagtgtttattacccatgatagacattcaagctttcggccagacgcaatggctcacgcctgtaatttcaacactttgggaggctgaggcgggtagatcgcttgagctcaggaatttgagataagcctgggcaacttggtgaaactccatctaaattttgttttttaataacaaaattcaggctgggtatggtggctcatgcctgtaatcccagcactttgggaggccgaggcgggtggatcacctgaggtcagcagtttgagaccagcctgaccaacatggagaaaccccatctctactaaaaatacagaattagccaggcatggtggtgcatgcctgtaatcccagctactcgggagagtgaggcaggagagtcactcaaatccaggaggcggaggttgcagtgagccgagatcatgccattgcactccagcctgggcaataagaacaacactccatctcaaaaaaaaaaaaaaattcaagctttcaagcaaaaattagaatttggaaaacttacatctaccacagtaggcttgacagcttttcagtacttaaagaccattgtgacaaaattgatggtgatattagtaactgatttttaatataatgaaatgtgttaacatttggatgatctgtatataacctcagtgaaccaatattttccaaatgatcaatgtatgacattacaaagtcaagcatgaataaaagctcaactcaaaatacatgataaataaatggattataatgtaacagagtgtgaaaacttcagtaatatggtttcagattacacaatgaaaataacttttaggaaatgaccacttgtcaagttttagtgtaaaataaaaagtatctgaaaagggctgggtgcggtggctcatgcctgtaattccagcactttgggaggccaaggtgggcagatcacttgagggcaggagtttgagaccagcctggccaacatggtgaaacccccgtctttgggattggtggcaggcatcagtaatcccagttactcaggaggctgaggcaggggaatcacttaaaccttggaggaggaggttgcagtgagctgaggttgtgccactgcactccagcctgggagacagagcaagactccatctcaaaaaaaaaaaaaaaaaaaggtatctgaaaaggctactaaaatactgtcctctctttttcaactacgtatttttcctttgcttttttttctttttttgagatggagtcctgctctgtcgcccaggctggagtgcagtgacgcaaccttggctcactgcaacctcctcctcctcccgggttcaagagattctcctgcctcagcctcccgagtagctgggactacaggtgtgtgccactacgcccggctaatttttgtatttttggtagagacgggctttcaccatgttggccaggctggtcttgaactcctgacctcaagtgatccatcggcctcagcctcccaaagtgctgggattacgggtatgagccactgctccaggcctggaggcaagaatttcttataggcttaaataaaaccaacctattgcaataatttgaatatagtaggagctatttaagtcgacattaataaagagatttgtgaaaatacaatagtgtcactcttcttccaattttttttatgtatccagaactatgatttttttttttaactacctatagaatgcttatatttttcttaaaaaataagtttaagaaccaggcatggtggtgcatgcttggagtcccagctactggagaggctgaggcaggagaatcacttgagcccaggagtttgagtctagcctgggcaacatagcaagaccctgtctctgaaaaaaaaaatagtttataaaaaataatttagccaaattgataggtggtgatgtgcttatgttttgtatacctactacactaagctatgaaaagaataatagaagtgactactactttctggaattggaaattcttggccatacattttttaaaagttataaacaactccatgtttttaaacagaatagaactccctctaaaagcagagctatctccaaaataaatattaggagtgtttttaaatgcttagagctaggttaaacagctttattcaaaacatatttaaatgttatatggtgaaatatcttctctgtcctctgaggtctttggcattatagagagattccttagtctgcttcaatgttgttcaaattcgaggtttccttaagagtctctttaggaagtaggttggtgttaggctaggcacagtggctcatgcctgtaatcccagctacttgggaggctgaggtggcgtgagaattgtttgaaccggggaggtggaggctgcagtgagccaggatcgcaccactgcactacagcctgggtgacagagcgaaactgtctcaaccaataaaagaagtaggttggtgtttatattgaaaataggaacagaaaacaaactagctatactttttaggatctaagctgagaataaattaatttttttgctttctctagctggaatggctttacttgtgtaaaatttggaaaagattattttgcaataaaatcaaacttacagaattgactcttgaattctagactaactttgaataattggacctgcagattgactatccaccatttgaaaaaaacttttacaatgagcatgaagagataaccaacctcactccacagcagttaatagatctccggcataagctcaatcttcgggtaagcatcattaagctcaatattcttaatattaatgttaattagtccagatttagtattattggttatctaaactaataaccttgaatttcttttctaatggtctctgaactgtctttgccagagtaattattatatcccttctgttcatgtctcttaatttgattgttttagtcttctagatgctgttttaggataggatcattttcttgtttcatatttcagtcagttttatatgttctgtgctggatgggctagtgatgaagggtgggagtccccatctaaaggaagaggaaacaaaaggaatagatgttaacagatgatatcttagaatattttgaaatgaagataaacttgtctgtcaaattacatatagtatgctttattttaaaaattagaataaactaataccttttaaaaatatgcatgtactaatttcagaatggtttaaactgcctaccagaaagttttgggctgcacattggctacattggtttaaggtgctgatagatggtaaatgaaacacacagaaaaaatatgctatgctatctactctaatatagacaactttctcgcctgtgtgcaccttatcagttgctacacgatgtttaaactcctgttttccaggaggggtgtgtatttgtgtgtgtacacttgtctgttttccaagaggttactcatctccccagtgacccaagaaaaattttaagtaaaacccctgaaatcctgattggaaatatcaacatcaccagagaagcattgaaaggttaccactttgggggacaaaatggagattataagccccattcttcacctaggtgcagtttgaacagggcttgacagtggctggaccatcactaagtgagactttaattcatcaagcataactgaaaatggaggcagtagattatatcttggtagccagcatgtgtagacttgtcttatttggagcccacttggaattttcatttcaagagtaagatacattaatttttttctaccatctggttaatacttaatgcaaaatggcaaaagaacagttatggcttcccaattcattgaacaattttttttccgttttatttgttatgagaaaattaattttgagttaagaaatttttaatcatttaaaattgtatgacaattatcttgggaatatttatcatggagtttttaatatgaggtttatatttgttaccatttgaggtttttccttttcattgtatgattttggcttacagacttgtatttttacttcatactccagctaaaatgctagatccaggtaagtattgttgaacttcaaatgctgttaatgttgaagtacaagtcattctggggagttgtctctatctctaggtctctggtgctgcacctcctagaccaggaagtagctttgctcattttgggtttgacgaacaacttatgcaccagattcggaaatctgaatacacacagcccactccaatacagtgccaggtaagtaaaacataatgaaagaaaaataaagtagggtagtctttcatgactatattaatttaaaaacaaatcacagcagtaaaacagtgtttagtgtagaaccttgttgataaggatagaggtatttatcactcttaagaagtcactaaatggctgacaaatattcttttgtatctgatacgtatgttgaaaatatgatatgaagaaaataatttattaggcctaaacctaaccaaaaaggttcgtatatagacaaatttagcactgtcaatgactagaattccttcgttcgtcacttgaaaattctcattcattactgaaagttttagcttctttttcccatttatatatgggatttatttattcttatgcagaacattctcattttctgtatatgaatgagatagtctgtaccttcttaaggggggaaaatttttaaaattttagcaacccttcattataaattgcaatttttctgttttgtttttgtttttgttttttttggggacagagtctcactctgttgtccaagctggagtgcagtggcgcgatcttggctcactgcaatctctgcctcccaggttcaagcaattctcctgcctcggcctcccaagtaggtgggattacaggcgcacgccagcacacctggctaattttttgtattttagttgagatagggtttcaccgtgttgcccaggctggtctcgagctcctgagctcagggaacctgcccacctcggcctcccaaagtgctgggattacaggcgtgagccactgcccggccttgatttttcatttctgtattttaaacaaaatggagttgtttctgttctgtaagtggtggctgatatccacgtaatgagaatgatgtcatttcctataaatcaagaagttaatgagaatgttggatattgatatttctatttcacaaccagtatgcatagcaccaggtatgttttgttccattgcaaataaaaatgttagtagtcatttatcattccccaggatttgcttcagtacatctttagaattgaaattttagagtggttatattttactttttctccagggtgtgcctgtggcattaagtggtagagacatgattggtattgccaaaacaggtagtgggaaaactgcagccttcatttggcccatgttgattcatataatggaccagaaggagttggaaccaggtgatggaccaattgcagtgattgtgtgtcctaccagggagctttgccagcaggtatgtgctttctatagaatgcctccttccatatgtggactagcaagggaccagccagtcaagtgaggtagaatgaccaggaaacttttttttttaattgtgataagatacacacaaaattgattatcttaaccatttttaatgtacagttcagtggcattaagtatattcacagtgttgtgctaccaggaaacttttggaaagtattatgtgttaaatattttctatataaccaaatacatattttcccctaaaaactactgtttttatttatttttatttatttgctttttttgagacagagtctcactcttttgcccaggctggagtgcagtggtgtgatctcagctcactgcaacctccacctcccagtttcaagcaattctcctgcctcagccgagaggctgggatcacgggcacacgccaccacacctggctaatttttttatttttagtagagacggggtttcaccatgttggccaggctggtctcaaactcctgacctcaagtgatctgcttgccttggcctcccacagtgctgggattacaggtgtgagccactgtgcccggccagaactactttttttaagaggaaaagcctattgtgatatggggattgtttgtattataagctgacagtttttctgtaggatgagttcattttatcttggtagaaaagcagtgacaggatcaggaagagaagggggtaaaatgaataaaagattttagataatctgttgagatgcaataatggtattccattcatttatacctttatgaataaaatcgtggttttaaagtatgttctaggtttcgattttttatgacatcacattctgtttttcagaacttcgtttgggttgtgacaggtatttgttagtgtcacagtttgttaatatattattcacaactttgtagatccatgcagaatgtaagcggtttggaaaagcatataatcttcgatcagtggccgtatatggaggagggagtatgtgggagcaggccaaggcccttcaggagggggcagagattgttgtgtgtaccccagtaagtatgccttgtgtttaaatggcttctcagcctccctcggtatggaaaacatgattagttttgcagagaatttcccctaaagtgtggtaaaagcagggttgaaaatatactgatgaacggcaggctgtggttttaattttgattggtggctaaattagcagttcagtgagagtctctgtgacatataggctagtagctacaaattcccctctatgtcaaatagtttttcttatactctcccacaaaatgattgccaagttcatcaagaatcagaaagatacatatggtcagaatagcctagaagagtgtagtttaaacattgaaacctgtcattatgctttaaatcaggtcactttagaatgcctcaaaaactgcttctggccactttcccacagaatttaaatcacagtgtaaatgaagatgccgattgagttttcaaaatttctgttcctttgagctaagtagtgcataaggtatgtggctgttggaccagtatctattacagtctgagactagagaattagcacttttgccaggagtgcaactgcttagaaagtccctgtgaatgcctttaattatacttactgttcattttgttgatcttatagggtcgactgatagatcatgtgaaaaagaaagctaccaatcttcaaagagtctcttaccttgtgtttgatgaagcagatcgaatgtttgacatgggatttggtatgccttgaataccagtttcttctgtccccatcctcatgatactagttttttttccatgtctttctagactgttttttcagcatgagagaagctaaaaatactcctggatggggttagactatagaaatatagctaagatgaacatttttaggagttttctctggaaaagtatgttaggttttattgggttgaggaaatttcaaagtgcctttgtatataaggggaatattttctctgtcttcatttttatccatatgcctttgatcatagaggttaaggtctgtgttcttgggtagatgaatgtcagatcattcgaggccctttgctttcctatcctcgtagctgtctttactgattggaacactgctagacctagcccagttggatggagggaaaatttttcacttttatgctgaatgatatgtttaggagcttcttttttcttgagacagagttttgcttttgttgcccaggctgcagtgcagcggtgcgatctcactgcaacttcctccttccagtttcaagcgattcttctgcctcagcctcctgagtagttggggtgataggcacctaccccacagcctggctatttttttttttttttttttttggtatttttagtagagatagctgtgttgaccaggctgcgaactcctgacctcaagtgatccgcctgcttcggcctccgaaagtgctaggattacaggcatgagccactgtgcctggcctggggtttctaattttcttaattcttacaacttcttatgaagacttttactaatatggctttttccaggcttcccaaactgtatttcaggttataataattttattgttctgtttcttgcagagtaccaagttcgatccatagcaagtcatgttcgtcctgacaggcagagtatgtatgaagcacctttgttaaaccaaatttgtactaaaaagggcacttatttattttataagcactcagagttatggaagtaaaaatgatcttgtgtctgttggtgagaaccataataagggaggtaatgagtttatctgagctggacaggatcttagcactagatataacttgttcctttttatagatgataaaaccaaggatcagaaattaaataaactgccctaaattatacagttttatcagtgggtagaagcagtgtacagtacagatctgctgatttgaaatcaagagtctttttctgaaccatactgacaacttgtcttaactaaaaatgtaataaaaatagaataagagcaaatctttccctagtgaatcagtttctaaactaaatttaaagttcaggtgagcttatgtaaaaaaactgaataatcctgaatgccaaagaagcttaatgggtatgcataaagatatcatattgtttctctaacagaatttatcttaccttttagctctcttatttagtgcaacttttcggaagaagattgaaaagttggccagagacatcctgatcgaccctattcgagtggtgcagggagatattggagaggtaaccctaagcagggctggatgggaccttaatgggtttatttctcatattatggaacacagaattaatttctcactattgagataaaaaaaaaagatgttatgtttatagatgcaacatgcttgagattgggtattttgcaagttgtggggatagacgtaacaagactggcaaaatgttgggaatcattgaagctaggtgatgggtatgagttgattttgttcattttgtgttttttttgttttattgaatgtctcaaaacttacaattgttttaaaaaggcttcaaagagacaaaaagatgtgcctggaagcatcagcgtattaggttggaactgacgttttaattattgtggtaggggcctacgcaggagggaaagggtgacctggaaggcctggaaaaaatcaggtttcatttcttacctgtacatatgcgctatgtgaaaaattactctgaattgggacttggaattcagttatggctgcttagagaatccttcagttgcttgccatggttattgttaaggaaagctctacaaagtagtggggcatacaaattaggtatgtacaccaggtggagagcaaggtgattggaaaggagaggtgagttttgagctgcacttgacttgctgaaggcccaaggagaactgggattgttcaaggtcttctcgatgcaggtagaaatataatgcctagtccttgttcaggtgccctgtggctccaatgtcacaatcatctgtttcatttcttccttctcaggcaaatgaagatgtgacacagattgtggagattctccattctggacctagtaaatggaactggcttacccggcgtctggtagaatttacctcttcagggagtgtcctcctctttgttactaaaaaagccaatgctgaagagctagcgaataaccttaaacaggagggtcataatcttgggctgctccatggggatatggatcagagtgagagaaacaaggtcatttcagactttaagaaaaaggacatcccagtcctggtggccacagatgttgcaggtagagtatgaatttttcaacaacattaagttcctaggctataagggtactctgtcttactacataagacctataatatctgagcaggctgatggaaagactgttggcctggctggccatcccctcccaaacccccaaggaagcagcagttcagcacagggatcacagtctggagctctagataccacttttcacttagtatttctctctaatcaaagaatccctgcagctagaagtcactctgggaaaaaaggcagtgaatgcccttattgtatgtctgaatatagtagataccttacccttacattgatctactatacacagcttagttgggcaacttaactcaggatgagaacagtttttggaatataatttctggatttgttctgtcaagttttaataactacccttaaacactgatattttttcctagaaaggagagaacttctcagcttcatgacacattttaaatatatattcccagtgcaagagaagagggcatggcagattactgatgcaaaagataaaagtcccagtcgggcacggtggctcacacctgtaatcccagcattttgggaggtggaggcgggcggatcacctgaggtcaggagatcgagaccatcctggccaacatagtgaaaccccgtctctactaaaaatacaaaaattagctgggtgtggtggcgcgtgcctataatcccagctacttggaaagctgaggcaggagaattgcttgaaccagggagtcggaggttgcagtgagccgagatcatggcactgcactcccgtctggcaacagagcaagactccgtctctaaaaaataaaagtcccttacactagaaggcctaacatcatagaatctgtggtggtgacttaacatgcctgtatctcagctcaccaaacccatgcgctttgcctagataaaggaaatgtggcttattagcactagcatttctggttactttgatcttctgactacagatgaagaataaaagaatttggttgctttttatttcagcccgtggtctggacattccttcaattaagactgtcattaactatgatgtggcacgagacattgatacccacacgcataggattggccgcacaggaagagcgggtgagaaaggtgtggcctataccctactcactcccaaggacagcaattttgctggtgacctggtccggaacttggaaggagccaatcaacacgtttctaaggaactcctagatctggcaatgcaggtgaggggctgggcacactttcaattgctcctggttataagaccaagacattttagcagtcctggaacagataacataaaaacttgacaagaaagttgggtggctaggaggatgtggggcttatgaggtacagataggaattgtgagatactaaaattcatctagtcttatctggtcttcttctttcaacagcatctgttttgaaaagctattcctttgtgctaaaatctgtcgctgtaatttctaccccatagcacacttaggagtaaatttaatctcaaagatggttactattctccttactgctcttcccccacaaaatttttcttctgggaggctaaaaatgtgtgatgcctttaaaacaatatgtgtatagtatagtgcccccccaccttttttttttgagacagaatctcactctatcgcccaggctgcagtgcaatggcacgatctcggctcactgcaacctctgcctcctgggttcaagcaattctcctgccttagcctcccaagcagttgtgattacaggcgcccaccaccacgcctggccaatttttgtaattttagtagagatggggttttgccatgttggtcgggctggtctcgaactcctgacctcaggtgatccgcccgcctcggcctcaacctcccaaagtgctaggattacaggcgtgagccaccgtgcccagcctgtatggtgcctcttaactgttccttgcagagatctcagacctctgaccacactgattgccctcttccaggtgtgctccaatctaaagctaagtgaggcattctaacaaatcaaacctggagtcatctgaatccatgctgtccccaaattacaaatgggttcggaacactttctgagagcagaaactgttaagagtttgtcaaatgcctaggccagctcacacaactggtacaacccagctgcaatgtggcagtgcccaagtttctggtcctaggagtaaaggacctgcactgcaggagagaagagaataatgtttcctcccctgctcctgagcacagagagctagtcctaaataaacttttaaaacaggacacattttgactttggcattttcttccatttctttttgtacctcaggctttctgtgctcaggactttgtccaagcctgctgccctacctctcaagcactttattttgctggtaatatgtgattgtcagataaaactttaaccttcccagagacatttgctttttttttttttttttttttttcttttttctgagatggagtcacactctatcacccaggctggagtgcagtggcgcagtctcagctcactgcaacctctgcgtctccggttcaaacagttctcctgcctcagcctcccaagcagctgggattagaggcatgtgccaccatgcctggctaatttttgtatttttagtagggacggggtttcaccatgttggtcaggctggtcttgactcctggcctcaagtgatccgcccacctcggcctccagagtgctgggattcataggcgtgagccaccgccctgcattcttaagagaatgtgagtaaatatgttgagtggcaatggtcaagttcaatgaaaacttttacgctctgcgggtaaataaaattttcagttgtgtggctaccatcctttctgggagtctgtccctatagtcagttctgataagcctcacttcacatagcatttttcctttgcttctgaacataccagttgtttaagttccaaatgtttacgtccaataatacatggtttgagaaataaaatataagctcattttcctcaaggaagttagaagtagccaaagttactcctctgggtttgaagcttacctgaacaacttcccttccaggagagccttgagggagggagcactgtaggaagccttagataaggatctcagccacttttcaaatttggtggattatgctaccaaagagaaaccaatctgtggttcctgtgaaaattcctcccttagcgtagtgctggctgaaaattaagcaaaagttcccccttcccacttaatttcctctttgtcctcgttctcttcttctgttcttttctccctcccttgacttaaccttgaattttgttcaatgcagaatgcctggtttcggaaatctcgattcaaaggagggaaaggaaaaaagctgaacattggtggaggaggcctaggctacagggagcggcctggcctgggctctgagaacatggtgagtctagactactacagtagtgcctttatagttggtctcatgtcctgaaagtcattaggaatattctcatctacccaggaaagcctcagtgagtttaaagccctgtctagaagggaatttgtatttaatctgatttgagtcaatgcagtgctcattcttatggtaactttctattgaagaagcatctttgtgtacttggttgactaggcttgctcaggaaattattctagattagcagtgatctcacactgtggtccctggaccagcagcacatgcaaactcatccccaaccccagaccttgtgaatcagaaactctggagttggggcccagcagtctggttttataagcccttcaacactggcctaaagcctgctgctaggtaaatgttgccaaagggtcactgtaaagtctagccatatcttgtcattaaactcaggaacggatcaggaatttccaagtcgggagctagtttttctcacaaaccaggtaacaaatgtacccttttggtggcctttcttaactgcctgttttctgtcaccttgattccaagccagggaagaaagctgccagtatacttttctggagcattaaacttggcatctttgtaattacatactctgttcccacattataataataatgatgatgatgcataataataggtaatatttattgagcactttatatgtgccaggaccattccaagcaatcagatgttttggctcagttaatcttcaaaataactgaatggaagttagtacagataacaatgctgaggcacctaaggttacagtgacaagtgttcaagccgaaattcagacccttcatggtcttgattcagggcctgagcagtcacacaatatgctattcagggccttttcatctttaacgtaatttttacttaattaattggaagtgtttatgtaaatacatgatcaactttgggcataatctgattgcatttctgtttaatagggttaatttccagaaatagaatttctgggttgagggcataagcatttttaaatgattgtcactgtgtcttttctcacaaagcagtagcagctttctaaaagtatccagttcctttgtagctcccacttcaagggttttcataatgaggcctagtctatagcagtgagctttcctgcttattttttcattctcatagatgtgtttatttttttaggatcgaggaaataacaatgtaatgagcaattatgaggcctacaagccttccacaggagctatgggagatcgactaacggcaatgaaagcagctttccaggtctgaaataagcatttcattaaaagcactttcagcagtaactcttgggcagtgacagaggggcttagttttcctggttgtagctgggcgcctaggcttgatgctagatttagggtcttcacgctgcttggattttgaatataaacctaacagtagcttagttggaaatgcaagttgatctagagaaccccttgtgctggtctactttgagtcacacttggggcctgggattgttgtcctgcagcagggtgtgtgttccctcccttcccaacagcctgaagtgttgcccacctcccaggcacccacctccaactcacttctgaagcaaaatttactgatagtcacactaaggtgaatcgatagaatgagttcaaggcaggttttgctgtcaaacttaaattgcagtatgaaaattttttttaagttttcagaactttttggttttgaatgcagataaatgtgctaaatacatagatgctttattctagccaatcaggctataaaagtacatttcagaacactgggggtccatctctccacagagatccacaagttttcctttatagcacaagaacaaaagggaccatactgtggggccatcaggacactaaactcacagtgccaggatagcacagagtttctgtaaacctcatcatttgccaagttgtatattcaagtttcttgaacttgctatcttacctactcctgatgtctctttctctttcagtcacagtacaagagtcactttgttgcagccagtttaagtaatcagaaggctggaagttctgctgctggggcaagtgggtggactagtgcagggagcttgaattctgttccaactaactcagcacaacagggccataacagtcctgacagccccgtcaccagtgccgccaagggcatcccaggctttggcaatactggcaacatcagtggtgcccctgtgacctacccgtctgccggagcccaaggagtcaacaacacagcttcagggaataacagccgagaagggactgggggcagcaacgggaaaagagagagatatactgagaaccggggcagcagccgtcacagtcacggagagactggcaatcggcatagcgatagtccacgtcacggagatggtggtcgccatggagatggataccgccatccagaaagcagcagccgtcatactgatggccatcggcacggggagaacagacatggaggaagcgcaggccggcatggggagaaccggggtgcaaatgatggtcggaatggggaaagcaggaaagaagcttttaatcgtgagagcaagatggagcccaagatggaacccaaagtggacagcagcaagatggacaaggtggacagcaagacagataagacagctgacggctttgctgtcccagagccgcctaaacgcaagaaaagtcgatgggacagttagaggggatgtgctaaagcgtgaaatcagttgtccttaatttttagaaagattttggtaactaggtgtctcagggctgggttggggtccaaagtgtaaggaccccctgcccttagtggagagctggagcttggagacattaccccttcatcagaaggaattttcggatgttttcttgggaagctgttttggtccttggaagcagtgagagctgggaagcttcttttggctctaggtgagttgtcatgtgggtaagttgaggttatcttgggataaagggtcttctagggcacaaaactcactctaggtttatattgtatgtagcttatattttttactaaggtgtcaccttataagcatctataaattgacttctttttcttagttgtatggccaggcagtccccattttaggagttggcttctgcaaattcaatccattgagctaactgttggggagcaatttggtagttgtagacatttgcagggaagggagatgtctgattctaaatgggagttgatgctcaggtccccagccaggtttgcatccagccctgagacatgtaggaaacacctttcagacccaggctctgaagattcccagaagccacaaggattgaagggaaaaggtgatcctggtaactgttccaggattgctccaggtttgagatggtattgctaaatttaaaattaaacaagaaacccaacaacagcttttaaagtgtcttctatctcattgtattttttttaacttgccccaatgatagaaaagtcttttgctgaaatgattttgatgatttttgtttatcgtttataaaaaggaaaagaaatatacaaactttgacttttgtgactttgtgaaggtttctttaagatgtgcattcctttctgcttgctctctagtaaatgttttactaccgggacctgtggatcgtttgtcatttctgtctatgaattggtacatattaagaatagtgccgcacacagtgtagggacagatagggaagtgcttattaaaactgtcagaaaagacaactcttccattatcctggttttattcaggaataggatgggggtggggagggcttaagtggcccacacgtccaggtgtagactgactacattgagtatcgctccaacaccgaacttccctttaacggtttaaaaaaagggtcatgagtgtcaacacagttcagcagtgttttcatgggagaccttcaggcaggcaggaggacatcctcctctctgctcaggaccaccacgggagttctaggcactccacctcactgttcttcagacagctgtgatgtgagcaggggctaggccggtaatcaagggggccagactgagccatgccacacccttcctcctagtccccatgctctcctgggagcctggcagctctgcttacttccgtttgtgttttttcttttgttccttacgttgctgtgctctttggtccttcttcatccttgagtccaccaccttgaaatgacctctgactccagctggccggcgcactttgcggcccacaccttttttggctacaacgtaggtgacatggcgtttctccttgccaagcccagccttcttgtagagactacaggggggaagagaagaggttagaggcttgctttctgctgcacttttagccctgtgtacctttgtggtgtcctcccattaccttcgcagctgtgccactttctctcgttctgagatgtccactgtgttcaccacggcttctgccttcttcctggtctgctccagcctcttcagcatctgcaaaggaacctgtcaggtgacctcttccccatccccccacccccaccccacccaatctctggaggccccatcacttaccctccttttctttctagccttagcctcagccaccttcttgatgggacgtgcattgatttcccgccagcgtttccggtaatgctccacctccttcttaccaacaggcaactgtcgtatccggtgctgcttttcctcttgcacaaaccactccggaagctccccctcatcctcattaaatgtgtacctgagtggaaaggacatctgtctaatatccaacattccaggctttctaaagaaattaccagactgggcacggtggctcacgcctgtaatccctgcactttgggaggctgaggtgggcagatcacctgaggtcaggagtttgaccagcctggccaacatggtgaaaccccatctctactaaaaatacaaaaattagctgggcgtggtggttggcacctgtaatcccagctactcagaaggctgactcaagcgattcaaggagaatcaggctgcagtgagccaagatcgtgccattgcactccagcctgggcaacagagcgagactccatctcaaaaacaaaaaattacccatttacccaccagaccctgggtcactcttgatgagtttatggcccctttaccggttgaaggagttatctatgaggtctctcttggcctttttggaagaggcaataacagcacctagagcaaggccttcggggtccagtatccgatgtttcgctagagagggaaggagaaaggtcaaagctcaattcccaatactgagacttccagtggtcttttctcattccactgcatacagagctctcacctgggtcctcaataggcactatctcaaacccgtcatcatctgacttaggcccacggcttcgcttcttaccacggaggggttcccagctgtgaagaggggaggactctgagtgattccaccactctgtactactcagaccgcactcccacggaatttgcaaaaatcctgccatgcaggctgtaccccagaccagttaaatcaggatcgtcagtacagtatttttaaccctccccatgtgcagccaagattaagaacccccaatttagagaaatggttcaagccaccgcttcctttccatcccttctctcagctgcaactactcacctctcttcttcctcactgctagtactgctatcactgtctgagatgccatccttttcttccccttcaaggccagtggcagcttctgtccccgaagaagcctctgttcccttaggggcttcatcttggtacaggggagacattatctcagtcttcaaacaggaagggggtgtctgtggcagctgctgcttctgctgctgctgccgtcccttccgccggttctcaaataacagctgggcctgactgatctccagggcctcatcggcatcgtcctcgatcccagcaaagctgccctgtgataggagaacatcagctgcccttctcccaaggaagactcatctccccgcagtcttgcccccggcctctccttacctttgagaaccacaggttggcttgttcttcctgcagtactgccttttcctccagtggtaccagcagtggattctcctcctcctcctcctctttatcatcttgcacttcagtaagtcgcatactgtagacccaaaggaaagtagggggctcagagacccagattgcctggagcccttgctgccctactcaggctctggtagtacccaccctaacacttcctcagagtggcagcattccctttggtgcacacgtgccccttaccgcttttggtcccttagaccctgatgtcccctgactcctgccagctcctctggatccaggtcactatccagagatgtgtcatcaccgtcgtcctcaacatctgacacatagatatcatcccttggcagatcggacagaaatgtgtctgctgcactcatatccccttgtgttacttcctctaataactgaagtgtaacagaaacaaaggtaaactatttaaaaggaaatatactgtttttttttctgtgtccctcacctcagtctatgctcagcaacactagaaagaacactggcaaatccattatcctttcacagatgggaaagctcagatccagggtagtgaatggcctgtttacaacatcccgttctaggctgggttactgatctatcccactcagctgtcttgtctcagtggtatcacaaataggtcttaaggaaggtacctacagcccacatagcaccaaatcttaacatattctacaacactggttttcctttaaaaattattctcagacagcatctcaatcatctcctgagaataccgtctacacagtttgtttccactgaataaaaggggcccagccaacatacatccaacaaaactgttccacttaaaccaattgtcagaaccttttattttcctcatggtaaagatactaggctgggtatggtggctcacacctgtaatctcagcattttgggaggctgaggcaggaggattgcttgatgccaggagtttgaggctgcagtgagtcatgatggcaccactgaactccagcctgggtgacaaaacaagatcttgtctcaaaggaaaaactccaactactatttcttgagtgtttatcacatatgagggattacacctatctttttttattcctcaccaaaaactctagtaggtaggttctattattgttttacagatgaggaaactgaggcagcaaggataagtggtagtcagctcagtcacttcacaaagctccaggtggtagagctgggaaggaaacctgagcctgtgtctgctctagggccaccatgctctactgccctcctgtacaacaaagatgacctgattatgacactcccacacataagccacaaaagttcattttgtttgtgaccctgattttgtcaggaaaaacatgttcttcagtattcagtggaagtaccctaatgcgagtgctcacttggtctcaatgaactaaagaatgctgctcccctctgagggagatcctctattcatctgtgcttgaaactcaagtaacctggcagcatctactataacctaagttcttttctgatgttctagttcttcaagaataaatctatcagccgggcgcggtggctcacgcctgtaatcccagcactttgggaggccgaggtgggcagatcacgaggtcaggaggtcgagaccatcctggctaacacggtgaaaccccgtctctactaaaaatacaaaaaattagccaggcgtggtggtaggcgcctgttgtcccagctactcgggaggctgaggcaggagaatggtgtgaacctggaaggtggagcttgcagtgggccgagatcgtgccactgcactccagcctgggcaacagagcaagactccgtctcaaaaaaaaaaaaaataaatctatcacactcatctatctacctaactcatcctttttggtttatgtttctttgtggccttatactcaccaaggcaccctgtggtgaagacagcaaccacagcctatcgttcggcaacctaaaaagacattcaacaccccccacctccaaacacccaaacagatccttctgtctcctaaacctgcacccccaatgccgcctcacctggtgaccccggatggtgctcaaggagaacatgccagtctccccctcgtctgcaatggaaaccccaggcagatccatcttcagctccacacgctcccgctgctttctctgctcacgcaacagcttctttttcttcctgagggggtggattgagggagtaaaaccggcccagctccaaagtttctatccatgccttgcattttcttctcccatcttcacacagtccctgcgttggggaactccaagctctaccccagctcctttcacctcttcaattccgccacctcctgggccttcatttctgccaaggtctggttcagttgttcctcctcctcctcttcctcctcctccttagagggctgctttgtggttccagctgttgagtcctcctcatcaccttcatcttcctctccagagctgaggctggcaaaacagtcccaagagttgggttattttcccagacttttcccctggacacccagtccacacctgcctcgctgcgttctctcctcacctgatgtccagtgcctttgcttgttctttcagcttcttggccacatatcgccgaagttttgttctccagtttagtagcgacctgccccagagatactattactgatcttgccatctccctctttgtccccgcccccttctgttttaggctcactacccacctttcgggcttcggctacataaatcaaaaggctcaggcccccatcccaaacctttagcacagcaatatcctcttcccagaggtccaacatcatggcctttccctgcctccagggctcctggcccccgtgcctaccccactccatacctgagctccttgcgccccaacactctgatgtcctgacagcacacccgtatgtcctcagtggtagctggatgctgtgccaactcttcatcatctaccatgatctgtttgggaggatggaaaggtgtcaggggagatcctcaggccatgtttctggggctacctcatgtccctcaaggctggagactcacttcgctggccttggagaggaagtcaacagggttggcagctcggaggaagtcagtgactgaggtacggtgatagagagtgaggtcaccctcagcatagccttcagccttaggaaggaaaagagagaagcttggtcaggcccttctaaggtacctgtaggacccaccaggcccaacctccctagagttccaggacccaagagtgaccccattccccaaaacacacctttggcttcttcttagtaaccaattcagtaacggtcttagcctgaacttcaacctccttaaaggcaaatttggggtcaaagaatttactgtcaaccttgtcaggggccaggaatcctaaaaatgacaggatatattaaaaagtgtgctttgggagttgggagcctggatcaagagaaaggaaatgatgcccaccttggcagactacaaagatctctgcagattcatggcgagaggcttggggcttggtggcctggacacggcggaacagctgctgaaagatccatagcagaggctgatagtcacgagaacggaaaacctttgtgatgaagctgccaccacgggccaaaaagtcacaagccaaacgtagagccatcagtgtcaaatgggctgtaggatagagacaattagttgacgcactctgcagcccaggagggcatgcgcccacctccaccatcacctgatctccaagcaccacactccctgtaccttgtgagtaagcatcatggacccagctagccccaacgttgggggccccatcattgagcacaacatcaaccttccaggtcttcagctccttcctcagggcctaaagagaagaaaaggaactatggaaacagaaacactggaatggccctggttcagccatttgtccatctagtcatttgctgagtgcccatcatgggccaaatgcagtaccaggcacaggagatacaatagtaaacaaaaacagtatgtctctaccttcatggagattacagtctgacactgaattcacaggagaagacttcactaaagatctctgcccttctcccaattccaaacacctttatccctgactctaaataaagcctggagtggacactacgaatgccataggtcttgtcgtacagatgtcaggcaagaacgtgctcaaagcacggtaaaaaggaaaaacttgcctttagaggatttcagggatgtagatgtttccgtataaagggggaaggaagagagagactcctattacctgcctacaacgttctgttgtgatgtcctgctggagagtcaccacattggggagaggcttgattggaaccaggtccactcctggaagaaatcaggtcagagtattctaaaaggttgcttcaagcagggaggagagaaatacaggacaaaataccttatacacccaccccttaaaacaccaaggagagctgtccgttactcacccacaataaggctggatacaggcataaacttggcagctacctgcagcctataaaaggaacagaaatttaaaaacctagagccatccttttccccctcttggcaactgatctctcatccctggtgttacgtgtactggccaaagcatatcataggcacgtattccaagccctttctctgcaatcaagaaaggaaacggcccccaagaggaccgggattcgggttcccctcccgcagtgaaactggaagccatcccagctcagaacccagaaagcggccaccaggagcaacctgtggcgagtgttacgaaccatccccctggcgcagcacacaggtccagcaaggctcgggctttctgcaggaactgaaagcggcgattgagctggatcagcttgaaagcagatcgggaacggtaacctggacaaaacaaccaagtgcgcaaactgcttcactagtaggatttctccggcctcgcaaccgaccaccccttctgcaggagaggtacataatggtcgcaaagagcaggcgaaccgggcagagatcgctcgctcgctcgcagactgagcgaatccggactcacccgtctccttcgccaagtgataaaacttgtctcgtcggctcttgccaactttgcccttcttgcccatggtggaaagggggagtatccctcaatctggggagaaagtagaagttgggaacgtctctttccggagcaccagattccacttccagtttcccacttccagtttcccacttcccgcagcaattccaccccgcgcccctctccgcacactacctagacccagagccgctttctccacacttggaaccgcacaagtatgcagctaactacttccgcttccgcttgcgtcccctgcgtccctggctcgaggttttccgccattttgagtgtggccctagattgttctcaatactctgtccttgggttttgtaagttgaaagttgagactaggaaggcatatcacaagaactataaacagagtttcaatgaggcaacactgaggaggagttctactccttcctcatccccttccaaagcccctgaactcgagtagccgcccctcccatcatggttcccttagtgtggtctcgccgcacaccccgcccattgacccggaattcttctctgcctggtcttcaggtcccaatcctccgcttccgcgcttgcgcgccaagacggctcggatgccggcggtctctgctgaagagagaagatggcgcttgacggaccagagcaggtatggcgggtgcagtggcggcccggcaggttacggggctgggtgcggagcgagcgtgatctgagtggagagcgggccggggcaggagcgtcgggtgggtcggaggtgcctggaccagtccatgctggacgctgcctgcgaccggatctgctgtgtcagcgccgccctcggtgagtcagggcaaggctgggagaggaagacgcggtagaagcggagtgagtgagggaagcgatgggcgcgggaatggccggcccacgggtcgcaggagacgggacgccagtcctttggctccgttccgctggctccttcgtcagtactgacacctcgggcttgtagagcacttcacgcagtgcaaagcgccccccgtctatatcatatcgcctctcggtcctcctaaaagtcgtatgaggtaggcggcgttcccattcttttattttagtcctgggaaaatggagggttccaagggagggagggattagaacccagatcctgagcctccgaagtccaaactttttctactacgcaaagctacctggtgtcaagccttattcaaagtgccctgcaagtggctttaccccctcggatgtttaacctgtcgtttaagactcactctgtgtcttcagatggagctggaggaggggaaggcaggcagcggactccgccaatattatctgtccaagattgaagaactccaggtgaggacggactccagagggagctaggaagggtgatgatgggggatggaaacggacttccacaaatccatctaattcctttgggagtgcagtggaagaagctgctgcttctcctttcttgtttgtttcttagctagtagggtgtatgtatcagaagtaagcaatctcttgttctcctccagtcccatctctttgagggtcttagtgttcacagtttgttacacatcttcgagtcaaatcttaatagtaaaggtacctctagccaaaggtcaacccttttggaagaagcccgaatgaaaaggattcttataaaagggaaacataagctcaggagttgaaatttatcaccaagaggttgggtgagggtgaagtgagaatgtgaggaagggcatcattgagggatctggacaatgctaattccatagagactgaatgaaagaaattgggcaacccagagccctagcctaaagcgctaaaccatagaaaaaggaccgtttatgttgttaatcaaatgtttgtgttaccagtaaggcttccagcagtaaggtatggcttccagtagtaagccttacagacaacataaacagtagtctgttagtgttacgttatactgttacggtaggctgttagtagtttaactttggacaggtccatggattttcaatttcaccctaaccccctgcgttgttcaagtgtcaactgtaatataaattggatgggggaaagccacaaaagacaattctgaattccaagtgcatttgcaggtattatgtttagtttaccatttttgaatgctttttcatgtgtttttattcgttcaccttagtagtcttgaagcagggtagctgatgctatacccatgtgccgtttggtaacagatctagatttttaaaaatagattgtcttacctttactttgcttttgattgacagcggctgggctagaactcaggtttctcacctaacaatctttccaccaggtgttgttgccttcctgcaagaaatttggtgttacatgagccagctgtaacttttctccattagattctgttactcctggaccagtattggacaagcagccttctttgatggctgctgtaaggtccagagggactcttgaaggacagggcagggtcattaggatcatactggagaatctgaaacaacatgcaggtgccctgtgcccttccctcagctcattcagacctgtgaggtcttggccaagatcctacctcctcctgtctcctgcccttgaataatggaatttgtctcttgtctgccacagctgattgtgaatgataagagccaaaacctccggaggctgcaggcacagaggaacgaactaaatgctaaaggtgagtggagaaagatgggaagccgcatgtgggcagtttgtctgaggtctgtccttatctccctgcactgtgtcttcacagcagtgcttactgttttctccctgtcatcatctagtagtttcacatgcatctctttttcctgagccctattgtagcctccttaaatacatgaattttgacctttggccttcctttaataagagtgatgcttagctcatgcacgtagaattgggtcctggagactccaaaggagtagctaggtgaccactgtgtctgtttgccatctagttcgcctattgcgggaggagctacagctgctgcaggagcagggctcctatgtgggggaagtagtccgggccatggataagaagaaagtgttggtcaaggtaaaagcagcatgaccccagggaccagctcggtctccactgcattcccacccctttgtgtgtagcctcgggagacagggttctgtgttctgtcaaggtattgtgggattctcataggtcttcctgggtaggattagtgatttggtggctgtcaaggaaggtcatgagcccttgtttctttaggtacatcctgaaggtaaatttgttgtagacgtggacaaaaacattgacatcaatgatgtgagtgtagcaggtgaggtggtggtggtggtggggtcagctcttactgtaccacttctgaaactcgcccccttcacccaggtgacacccaattgccgggtggctctaaggaatgacagctacactctgcacaagatcctgcccaacaaggtagacccattagtgtcactgatgatggtggagaaagtaccagattcaacttatgagatgattggtggactggacaaacagatcaaggagatcaaagaagtgatcgagctgcctgttaagcatcctgagctcttcgaagcactgggcattgctcagcccaaggtgaggagcagggcttctctgagagggccaagctgtacttactcctcctgccccagccagccctactgcaggggttggggaggcaccgggataggctgcatcttgcttgggctggccctccccctgaaaagagtggctggggaagtgttcctagggcggtgaggtggtttggatagaagggaccttgatgttccttttttttttttgtatccctaacatctagcaagggacccagcactcggtaaatgttcactgaatgaaatgaggggtgtagctttctgccctgagtcctgctgttcccctgtagggagtgctgctgtatggacctccaggcactgggaagacactgttggcccgggctgtggctcatcatacggactgtacctttattcgtgtctctggctctgaactggtacagaaattcataggggaaggtaaccatggctagcaatgtgagaagcaagaggtaggggtagggggttagagagctaataagctaataagctccctaacaccagctcggcctccacacaggggcaagaatggtgagggagctgtttgtcatggcacgggaacatgctccatctatcatcttcatggacgaaatcgactccatcggctcctcgcggctggaggggggttctggaggggacagtgaagtgcagcgcacgatgctggagttgctcaaccagctcgacggctttgaggccaccaagaacatcaaggtaaggtggtagcatccttgggatgggcccagggaaggcctgggtgccacgcaggctgaggaagaggtttagctgatccccacttgctttctctgctcaggttatcatggctactaataggattgatatcctggactcggcactgcttcgcccagggcgcattgacagaaaaattgaattcccaccccccaatgaggaggtttgtgatggacactgtgcaaagtggctctggctgtgggggtggggtgtggggctcaggcttttccttgccatctccaggcccggctggacattttgaagattcattctcggaagatgaacctgacccgggggatcaacctgagaaaaattgctgagctcatgccaggagcatcaggggctgaagtgaaggtaattggagtacccactgaaaacagggcagaggcaggaagctctgggctcaagggccacagatgaggggcacagcagtggggcctcaatttccttttcctgttcagggcgtgtgcacagaagctggcatgtatgccctgcgagaacggcgagtccatgtcactcaggaggactttgagatggcagtagccaaggtataggcctccatctttgtgcctttgccagtggtggctctggggcagtgggctagggcatgtgtgtgttcgtaacttaatgttcattctctctcccacccctaggtcatgcagaaggacagtgagaaaaacatgtccatcaagaaattatggaagtgagtggacagcctttgtgtgtatctctccaataaagctctgtgggccaagtcctctaggactccagtctgttaatgagggctgtgctgttcaaggaccaggtccaggcaccaccaatagacaaaaggatttatttggaaatttccaaacctgccagatgtggcactcgccaagccctaggcccaccctcctcaccaagctccaaagggcaacaccagtcctcccagcctccccattcaccttaccctggcctccacatgcacataccccatacctcaggccatgctagagaactggagtgtcccctccccggcccaagccgctggagaggcagccctctggcatcccaggagatgatggcggccagagccgcttgcatagattgaggaaagaaaagaaggaggcacctaacaggctccctgaaaacccccaacttacccctgtacaaaaaaagtggctcccacatagaaaacttgctcccaaaatagtgcaaatacccaaaggaaaggaaaaaaccagcagcaaggctgggcttgtaggaatggcaaagaactttggtttagaaaggctaggaagagtctgggctgcacctcctcttcctagcccagctccccagagccagctctgaccctcgccccagggggagtctgtaaacatgcaaacccagcagcctttggttcggaaatgtcttacaatgtcaaagcacagcctccagcagtcctacttgggcctgcctgcaggggggcagaggaggcatctgctgaacccaattaaagccaatgcaaaaagtataaggctttggggaccaagcaacaaggaatcctatcactacatttataagactaaagctggagagtagagggtgacagcagacactcctcaccccagcctacgtgtctgcggccccagcaaggacccagagggtggtctccctccaggctccagggctgggaagaaagatccctgagcagttaggtcaggcgaattcccagcacctgttccagttcctgccttcgctgctgcacctggagaagggagaaaccaagtggctcaggcctttgctactcacggccaaaggagggaaaacagggcagagcctcaccttggcaaagatgtgcctgcctactgcttcctgggcccagggctggtggtagaaagcagctcgtctctcctcctcaggatttccaatcacatcagtgatgatctgcaaagagccaggaggaaagccatagcataatccccacccctgggctaatccaccctgggaactgctgtgggtaaaaatcacccagagctttacataggagtcccctcgggaaagaggactacaccttgaggtctcggcgctgggaacggagccattcctggatgaagtcctgggggtcggtgctaaaactgagcatgaaatctctctgggtcttcagctggttgatggactcaatggtctcatggatctggagagggtacctgtgtcagactgtgcccccaaagcttacatgcaagcaactgagccagagttcccatcccgtcctccaggtgctacatgtatggaaatgctggacagagccagcccaccccaatcctgggccccagaggaagctgtggagccagagggcccaccttgacatcaagggaggcgatctcctgctgattggtggtagaggccagaaaattgctcatttgggccttcagtgggtcgtccacctccacatcgatgtcgtaacaggctgtcttcttctggtcgttagggtcgacactgcaggcagcacatggggagggaaggcacatagctgacttcatcctgcccacctgggccaaatctggggcccattctctgcacacactcagggaaaaagaaacctgatgctttctttggctttagttcaagccaagggtgaatctgctcttagaagagccttcctgtccccctccttgcatttacctaatgacatggttgatgacaatggggtctggatgctgcagcaaccctgccagcttcatgggaatctcggagaaacggagtcggccacaactgaagatctggaggaaatacgaaaggctcagcgttggcttgtgggcacagtggagtggaccattccaggaccagtgagggcagcagtctgcaggctgtggccaaggagtagcccagcaggcaaggcaaagcaagggctgagaaaacgggggctggcatctggctaacctggcggaagtaacggttgcagttgatgtactcccgctcgtgcccatcctgcagctggttgtgcttgatgtaaagccacagggcctgcatgatggcggccctcgtctgcgtgtgcactcccagcagccttgccaatcgggggtccaatttgtactggggaggctggagttggatggaggggagtcagaacgggttcttatagtagaacagtgggaaaatagggcagggacaggaagggtttctaggaaccagctcccctcctgaggggtccctgtgggcccagaaatgaccccagggtctctgtcacctgatgatccagcatgagcaggagggtgcacttgacgttgaggtctccaggccgttttacttggaagccatctgtctcctgggtggtgggcatccggtgccactggcagggagggaagcatggcttatcaccaagggggtgggcgtgaacacagggcctcccaagggccctgaggccatttccctgccaaacctgcacatcagcctgcttttgccccaggcccactctcacctccaccaggtgattgtcaggcccgtacagctccttgtccagctcaatgacgaggctcttaaagaatgaagaaaacttcctcttctgtttgctaggctggggatggaaaggggtgtgagatggtgctgctgagctctcaaatctcaagctatgctaaatcccaagaaagagaagccccatttcagccctggagctccggatactgaagattcctgggccctgaaggatggaagcaggactctgggcagactggaggcagggaaatggtgccctcttgcagcccacgagggacttcctcgagacactcgactgccatctgcaggaacactgtaataaccacacaaatcaacctccaacgggcttggagcagcgcccccctccctatggcaggacttctctgggagcgcccaagtgtctggcccagtctttttttttctgagacacaatctcactctgtcacccaggctgaagtgcagtggtgtgatcataactcactgaagctcgacctcctgggctcaagccatcctcctgcatcagccttatgagtagctgggactacaggtgcatgccaccgcacccagctaatttttaaattttttgtagagatggggtctggctctgctgctcaggctagtatcaaactccttggtctcagtcttaaacccacacaggcctccttccctccagaacctccctccccaactcacatcatccagcagttttccttccactcggagttcccaggaagccaccttgtcccctgctggggttcccccaggggtccctgcagttcctgcactatcgccttccgccttgctgggactgaacgtattggaaatgtagatccgaagctttcgcttttgctaaagagagaaaggcaatcacaactggaggtggaccaagatgctgggacacagtgctaccgcatcttctcatatgaaccattcaacaatcagtactgagcaccatgagccagccaggcaccttgtcaggtactgggaatcagaagtagtaagtcccagtcccagccttttttttttttagacatggtctcactctgtcacccaggctggagtgcagtggcgcgatctcagctcacttgcaacctctgactcccaggttcaagcgattctcttgcctcagtctcccatgtagctgggactacaggtgcgcaccaccatgcccagctaattttttgtgtttttgtaaagatggtatttcaacatgttggccatgctggtctcaaactcctgacctcaggtgatctgcccacttcggcctcctaaagtgctgagattacaggtgtgagccaccgcacctggccggaactcaccattttatggggaaagagatgcatcaccaacaatgccagcacagtgggactggtgctacggcatgatggagtaacacgcagccagtctctggctcacatcttacatgaaacccaaacacccatcacggctccaaaatatcctagtcccctggaaaggcttcaccactcgggactgttctacattattattaagaaaagcttctcggctgggtgcagtggctcacgcctgtaatctcagcactttgggaggccgaggcagtcaggagttcgagaccagcctgggtaacatggcgatactaaaaatacaaaaattagccgggcgtggtgacaggcatctgtaatcctagttactcgggaggctgaggcaagaagaattacttgaacctgggatgcgaaggttgcagtgagccgagatcgcaacactgcactccagcttaggtgaaagagcgagactccatctcagaaaaaaaaaaaaaaaaaaaaaagaaaatttctctatggatggggaaggggaaggagaaaggaactacctttatcccctagtctagtggttttcaaacttttgaccaccacccataagatttacattttcaattatgacccaaggtctgcatatctatttatcagaaacaaaaatgtcatgaaagaatccatttactactatggtaagtactactgtgaagtattttaagattttctactgtcatatattcatttaaaacatactggccccaacacattcaactgagttcgtactctactagtgggctgcatcctgcatgtgaaaaacccggctctagcccaacttgcttggcccctggaaaacaagggggtggaaggcaaggaaacctgggaaggctagaggtggtcagggccacacatactgtcagaggctttttgatggcctcctggatctccatccgcttgcgagcaatggtctggtccagcttccgctcaaaagccaagagatccatgtacgcctgagactctggaacaagctcccggatctgaaggaaggtagcagaagctcatcagcttgcttcagccaaagcctggctctttcctcccttcctgctgcagcccagctttgagagagatggacacccaccccaaggtggccactgggcaggcctcccaggtgtcctcttaacacttactcgctgaggtagaaccttatctgccatcttcctcctctttaacctggggaggacagaaacccacttaagaggtcaatggtccaaaaaaggacactcactcccataacgcccctccagtctccaggaccctctcccccaggagagcctggagtcatcctcagtcaccaaagctcttaagatagaaggaaaccctctgctaccaccagagctgagttaggcagagtgagagaagcaggatgctcttacccccggcgctgggcaggcatgggaggctgcgcctggggcacaagcaggcgttttcggaatggatccatcatggtgggtggcatgccaggtcgaagcggagctgctgcaccaaatggggagccagcagggggtcccacctgcaagccagccatgggcatccggttccctggtgacatgccaggtcgctgggggaagtgagccaacgggggtgcataggtcaggggcaaggccctccgggacccatagcccatgccctccatccctctcgtcagccaggtagggcctgagcagcacaccagagccctgctggagccccaggaacaaaggggagtgggcgcctgagcacagagtgtaaaccacacctgccctgccccctgcaaccgccctggcagccatgccagcgaatgaggcctgccagaacctgggctgggaggagggtcctgcctgcagagggaagggccttggggagcttttcagggcccattgctaccttccagccccagcatgctgtgccctattccctgggcaagctggtccctattctctcagacagtcctgccaagccctgccctccttctctttctcccatcatgaagaagaagcatggctgagaggcacaggggcagtgtcactgccaggcagaggagtgtactatagtatgagtaggccaatggcgcagagccccaatccccatcctctgtggccgagggagaaaggggtctggtaggcagcagcaccccaggtgagcagggctgcaacaggatggcttggaacgtgtaccagctggtgggggtggcctcgggcagggtacagggaccctgtaccctgtagtctggtatcacatagcccccacccacagcccagaactggaccctcctcttacctccctactgcccaactactacccctatgacagaagaccccagaagggaagctatggctcctgggtggcctgtgggaaagagagcagctagcacctggactctgccagtggtccaggcaccacctggcagccaggactggctctggctccgtgtagccctggcaatcccaagctggagaagggggctaagattatcctgggaggcaaggatagaggcccaggctgagcagcaggaaagtgggagacagaaatagcttctttagatgcctgcagaaggatttcccacctgaggccttgctccctgacatttctgtggagcccatctgggagtcacctccacccccacccgcctccccatggctgctgcctgcaaggcctgtttggcagctctgccttgcacacactgtccctggcagcttcacagggctggccccagggcccagattatgcaacgagcacaaccagccaaccaagcccggcagggtggagacttgtaccaaatcaaaggaccctcccccaccccagcatcatggagatgagattcttccccaacctcttcatcccgcactaaacccatgttcccaacacagagggtcagattcttgaccagatgcggagatggaaagaaacatgacccacagacgtgaggatggggagaggaggagcagggtgggacggaagtgtttgggagaataaaaagttcaaagtggggggctctggggctttgggagtcctgccaaagtctctctgcatcaggaagagattaatcagagctgttgaaaggcaaaagacagcctctttctctgccttaaagattgttctttctctggcctgagattatagaaaaaaactaagtgtggctacagctgtaagcccaggcccagacatcccagactagtttttcctagtgcctgagacaaagacagggaagaactgaagcagtgggtcctgcagaggtgagcgagggccctgtggtccccaggaagctccctgctgcagtgttcacaaaacctgcagcaccacccatccctcctgggcaggtgctccggtaacaggaagtcccaagacaaggcctcataggcagggtctggaataggctccacccagacatctgctccaggtttcctgggcccagagcccctggctcactcagggccccaggggaaggctgcttatagttcaagtcccagctgagccttgccaagctccatagggcttataggcgctagcaactcctcccacttcaaaaaacaaaacaaaacaaaacaaacaaaaaaaaacaactcaggagttaaagaaaaaaaaaaaagcagtccagcactctgagcctccctaactccctgcctgcagcaggaccaggtaggcctggatcaatcccctgaaccccagatgaggaatccagggctccggtgagcgtgctttgccctgccccaaatgtggccctgatgctcctggaacctgggcctgagggcctcagttggggaacataccacccactctcccatgagtaaaaaggattttgaggccgggtgcagtggctcacgcctataatcccagcactttgggaggccgaggcgggtggatcacaaggtcaggagttcgagaccatcctggccaagatggtgaaacctcgtctctactaaaaatacaaaaaaattagccgggcgtggtggtgggcgcctgtaatcccagctactcaggaggcttgaggcagaggattgtttgaacctgggaggcggaggttgcagtgagctgagatcatgtcactgcactccagcctgggcgacagagtgagactccgtatcagaaaaaaaaaaattttttttttgaactttttgaactctctggagtgaacccagcaatctgaggtttttgttattttgttgcccaggctggagtgcagtggcaggatcatagctcaatgcagccttgaactcctggactcaagcaatcctcctgccacagcatcctgagtagctgggaccataagcgcacaccaccatgcttggctaaatttttttttttttttttaagagatgatggtctcactatgttgcttaggctggtcttgaactcctggtctcaagtaatccttctgtctgggcctcccaaagtgctaggattacaggtgtgagcccaccatatcctgccctggaggtttttttcttttctttttctttttttaggttcctctgttaactgtgatccacagctagaaccaccctctggaggaagggaggtcatcacttcccttctttcaactatttgctcagcttgggcctcaaattctcacttttcaagtgcatctcatgagccctaacagacaggaacccctttgtttcccagatctcaagtcccttctcctggcagtcatacaactggacttggaaagaaggcaaataggatcctcttcaaactcagccaaagttagctggctgggttctccttcccatctacctctcctgccaggaggaggaaagctagtgggatgggaaacccagactcagggccatctcctacttccgcacagctagcagcccaggcctaaccagccagccagcttggccttgccacaggcccaaggccaccccccaccaaaacatgtggaatccatcctctcaggggctgtcccaagggcacatttcctatggcttgcatgccaaggaaactggagcggcttgtctgttccaggtccttccaaggccaaaggcccacagatggtgcccaggccaggtctcagtgggcaggcccaagggctacaatgaatgatgcagggagccctcagcaacaccctgggcccatgaatccccaacggggacagcaaggtgggagagatgagccccagctggaatccctgggaccaggtctgtctctgcccatacccagactctcttttctcttgagaaaggaggaagaatgaggagtaagaaggaaaaaaaaatccagtcactgtccctagttaagccatctccttagaagtgagggcccagtggggcaggtaggctgtgtatactccacgaggatccctaaggacctctgcctggagacatgagtcgaaaacagaggaagcccacagcaaacccgtagatgagcaagaagccagtgtcaaatgcttgggcacatggcttcggacgtggtggagttagaacctgaaggccaaataaaaatgcagagagggtgacaaggcagatgggcacagtttccaagccctctggggcaacctgaacagcagactagagcactggcagggtcaggctgaggtcctcacacactgagcagaagtcgctgctttgcaagggcttttgaagctgcaatctgagcagctctcaaaaccccaaaggggtcaggacagcactctttgaagcaactctcgcagactcctccggccccagaccagcagggctccactctgcacgtccagactaatcaactcccggacacgatgacaggaggcagaaagcccagaagagagccggcctgtgactgggctgggcctcccctcaggccaggccaccaccgtctctggtctaagctggagtcctcccagcgaaggcgcctggccctgcctcaggagtaaagtccgcccgtgcacaagctggaatcccctggccctagcctcagcgtcccgtgcccgtgggaagccaggctccttcctccttattagcagccgggagccatctcagacacgctagagctccgccagttcccaatcagaaaaaacagggcagacttggactgggaccaaggccgatgcagggtaaccccggtttctcagcgagggccctttcccaaactttctcatcactttccagccctcctaccctagacttctcaacccacccgccacaattcactggctccccaaactcctccatctcccagtcactcggaatccctgtgccgcggaagcccccaggcctcccagctgcttccagccctccgctgcagaacctgcttccccttcccacttctccaccgcgacccgccgcagcccgagggtcccggcccgccctccaccgtctcccggagttcctcatgcattccccagggccctcactcgaggccccttcagccgccggcccgggcgccctcgcagcgcctctcgcccccgtccgctcgcgtcctccttgctcacctggtactgcgccgcggggcccgcggggcccatggggcggaaggcggcggccccggggccccccacgcctcctgccggacccggtccccggagcgccggtccgggcagcatgccgggtcccgcggggggaggcggcgctcccagggccgcagccacggcgccgccgccagggcttagcgggggcagcgggaacccgcccgcgcctcggcccgacatcgctccgtcccgtcccgcggtgccgcgatccggactccgggctccgcgtcgagtccactccgtgctctgtgctccgcgatccgggacttggcgatcttaattccgggttccgggatttgtcgatccgggctccgggatttcctaatccaagttcgcgagttcctcacagacccggttcgggacagattccgctcctgcccgggagattccggatccaggatctgctgcgggcccgccttccgtccccggcctccggaggtttggccgcccgagtcgagttacccagaggcggctacgaactccctgccccgcccaacccagcccagcactaggccccgcctctacctggtgcccaatgctcgagtgcctcctcgaatcctgcccctcgcgagacccgcccccagcgggcaccgcccctaactgccgacctcagagccccacccccccacctttggcccagcctttcgtcggaggggcgggagcggaagctgcgcgcggaagcgccgagtgaggcgcggggtcagaggtctaaggtcacttaggggcttcacagtgaatgagccgttgctactactctctcccggtatagcaccctcaccgaattccgcggccacactccccgaaaatagttttgtcaagtctcctttctgcatcttcggcgttaaagactcaactcagagtcggtagctgtggctcacgcctgtaatcccagcgctttgggaggctgaggcgggcggatcccctgaggtcagaagttcgagaccagcctggccaacatggtgaaaaccccgtctctactaaaaatacaaaaattagccgagtgtggtgacgggcgcctgtaatccaagctactcggcaggctgaggcaggagaatcgcttgaaccttggaggcagaggttgcaatgagccgagatcgccccactgcactccagcctgggcggcaagagtgaaactcatcaaaaaaaaaaaaaaaaaaaaaaaagactcagctgctctgtggggcagaacagcagccaactcaacttcctgtaaaagctcatgctggtagctcggaactgccaagggacctaggaggctccagacttgacccagctggtgaacggtcgacttggccaaggctgagttctaccgcacatttttaacgtggctccgcctcactttaaggaagcctggtactttactccccagaaaatgcttctagtcaaaagaaatttggcttatgagaaacctccccgcagtttaaaaaaagaggtctttctccagtatttatagcacttaattttcaaaaatgcagtatcttttcaggtacactgtgctgtatcaaagtattcaaaaatgcgtcagctgtgccagggagcctaccctctgatggtctggatctcctcgccgtgatatggaccagtgctgcttaaactttaatgagcacataaaaaacactcgaggctcttattaaaaatgcagattgtggcagggcccaggactctgcatttgtaacaagctgccagcgatgctgttgcttctcagaccacactgtcaagaagccgggatctagacttttttttttttttagtttttttactataattgctttatttttccagccccaaccaagtaatacttccttccttgcatcatagcaccccagatcttttttacagtatagttctccagtgctttttagaaattagttctcctcatgcctctagtgataaacaccgctgctgctgttttcttacctcctgaacttagagatcccactctattgccccaagagtcgataacctgtcagtctggggactggccactggaattgttaaagtcactgaatcatggcccctcccatccctgtaaagtgggttaagagttcatgataaggcagctaatatccatttcaatccttttaagcttctagaacaacagtaattctcaaagtgataggggcagtggagaatcagagtcctctgggaagctactccaaaatacctccgccagccacccctccaatccaatggctctcagtattgtatttgaaaaataagcttcctaggtaattctgatgcgacccagtgggtcgcatcagaaaacacaagattttttctaccctagaaaaggggcaagctaataagtgcatttaaaagcagatcagctgggtggagtggctcacacctgtaatcccagcactttgggaggccaaggtgagtggatcacttgaagtcaggagttcgagaccagtctggccaagatggtgaaaccatgtctctactaaaaatataaaaattagctgggcgtggtggtgcacacctgtaatcccagctactcaggaggctgaggcacgagaattgcttgaacccaagaggcagtggttgcagtgagcagagatcgtgccactgcactccagcctgggtgacagagtaagacactgtctcaataataataaagcagatcaaacggttaaatataactcagttcctgtcaatcccttgtttaaaaccctccccagctccccattgctcttagattgaatgtcacactccctcctgtgacatttaaggctctgcaggacctggtccctgcttacctccttgggttcattttaaatcactgcctttggctctccaagcattggcccagatggtctccttgcagtttttcaaactacccatccccttcccatctcagagcctctctgttctctcacaccctacttcccaccaagtgattatcacagtacatcattacttaagtgtgtgctgatttactgtctgatgtggctcacccactaaaatataaactctacgaaggcaggatctttttctctctcaatttatctttttattttaaaatttgtatttttttaagacagtgatttgctaggttgcccaggctggcctcaaacccctgggctcaagtgatagttcctgaatagctgagtaggtatacaccacacctggctatttttttaaattgaagtgagatttacgtaataaaattaactgtttgaaattgcacaattcagtggtatatattacattcacaatgttgtgcaacacctcctctacctaggtccaaaattttggggtccaaaataatgaccccaaaagaaaactccatcctcattagaagttgctcctcatttcttcctcttcccaacttctggcacccaccaatctgggttctgtctctagatttatctattctggatacttcatataaatggaatcataataggtgggtgttgggcatggcttccttcacttagcataatgtttttgaggttcatccattttgtagcatgtatcagtacttcctttcttcttatggctgaataatattccattgtatgtatataacacaatgtgttcatctgtttgtctttgtatttatttgtttatgacagcatctcgctgtgttgcccaggctgatttcaaactccttagctcaagtgatcctcctgccttggcctcccagagtgctaggattataggcatgaaccaccatgcctggccctatccatttatctgttgatgcgcagtagggctacttctacttcttggctattccaagtagtgctgctatgaatatatatttgtatttgagtacctgttttcagttatttggggtatatactgtgtctcccttgatccctgttgtaacttaacaaatatgtatgaacagacaatgtttgagtgtagtgggagggaatgataaacaataatataatatcagttaatatcagatatatcagataatataaacaatgagttaactgtgttatgataaaatatccttaaggtgttagggagcaaatagagatatctgaggcatggtagagataaaaggaagatttcctacacagtaggcagagaataggtaacatttactgagcattttctacgtgaattagctcatttaatcatcacaacacataggaggtagataccatatatgaggtacacactatttttacctctttttttttttttaaagagttggggtctcactctgttgcccaggctagagtgcagtggcatgatcatagcttgactaatggggcctcaaactcctgggctcaagcaatcctccaacctctaaaaactcccgagtacctgggactacagacaccagcctctatgcctggctctatctctgtttgagaaatcaaagcatggagatccagtcacttgcccaccctcactgtgatggtgctaggattcatcaaacctgtttctgatctggctctagaatccagtctagggactaaccattacttaccaccgatttttggtagctgtgtgtctggtctgttattacttgcaaagaaactgttaaaactgaaaagtgaggctgggcaggtgactcatccagcactttgggagctgaggtgggaggattgcttgaggggttcaagaccagaccaggcaacatggtgagaccctgtctctacaagaaaatgaaaaaatttgcagagtgtgatggtgggtgcctgtggtcccagctacttgggaggctgaggcaggaggatcacttaagcccaggagtttgaggctgcagtgagctctgatcatgccactgcactccagctagggctacagagtgagatgttgtgtctggaaaacacaaaaacaaaaaactgaaatgcaagtgtcatagacactcagagaaaaagaagttgattgataggccctgattaatcgaagtttcctggaacactttgaagtggaggcaatattcccctgcctttgttccctcagcttggaatgtctgtttctcttcctcccttgatacttattctgctcagtgcccacttttcatggacttcattcaacaacttttattgagcccttgtatggtcccaggcttacagtttagaggagggactttcctataaccttgaggccctgttaacatctacagatactcaaagagactaaatggaactaaaaagtatttaacaaactatttaataataaagtatttaatacaaccagagccaatgggacaattcccagcacagactctgggaattttggctccttgcccagctgcatgaaagtagcacccaccaagtagcttggagaaaggcccttggagcaaggtggcccagtgcttgccctagagcaggccagcaaaggaacattcctcagtatggatgtccttcagggggttggaatttcatgagaagcaatgtggatagtctggtcatggtgggaaatgtttaccaagatggcagcactggcggagctgtatcagagcctgtcccagctggagcaccccggcagctaagtgtccatctcccacatggatgcagagtagggagaggaagggacagtcagggcagcagaaggactggatgccaagataatgtagcaggtgctgtacgcagcatttgagaagcatttattgagcaacttctatgtgccagtccctgacatatgctggtaaagaagataaatgcataaacaggtcatttccccacatgacaactgctaagataaaagtattcacaaggtaccatggggaaacaaggaggcctttaatgagggaaagggattaatgaagacttcttggaggaggtaacaggtgagttaagcaaagaagacacagtaagagtcaaaggcatgaagctgtacaggatgaggagaatcagagtgagagttgccagatcactgaatgtaagggagagctcctcttctgtgagcacattgtggtcacagttctcaacacacatactgtcacagcacagtctagcggtaaaatgcctgaagagtacagacttgcagtgagcagagatcgcgccactgcactccagcagtgcagatatcagcatataagaagtgggctttgggccgggcgcagtggctcatgcctgtaatcccaagacggatcacctgaggtcaggagtttgagaccagcctgaccaacgtggtgaaaccacgtctctactaaaattacaaaaattagttggacgtggtggcgcatgcctgtagtcccagctactcgggaggctgaggcaggagaatcgcttgaacccaggaggcagaggttgcagtgggctgagatcgtgccactgcaggccagcctggcgacagagcgagactctgtttcaaaacaaaaaaacaagactttttgcaaattatccattgtcaaaactccgccaaatacatctcccagcccgccagggagcagccagcagaggccgcaagctcggccaagcgagccgggatgtccaaggcgggaacgtggcttcgcgcgcaactctctgagacgcgggccggctcacgtgtccgggccgcaccacgaaaacaacagccacaggggagaacaacctcttgttttcctcatacagccgagctttgctgcaaacgatccctttccttttgtttccacattgcgttattcagaagtggttatgcggcgccaaacacgcgctttctgccccacaggtttcagccttccccaccctcatcttccccgcgctcccctcccgtcgttgtagcttcctgctcgcccctctcatctcagccaaccctgctgagctttcgcgtgggcgtcacgagtttctaggcagatcaggaaaaccgctctccggccgcaccctcgcgcgcccccgcctggcggtgtagaacaaacggtctgagcgcttggcgggcgactgagagcggagcgggcgaggccgaggagcggaggctgaagccgtgaggagcggcccggcgagggcgaggggcgtgcgagcgggcggccgcggctcggtgaggatttcggtcgtgttttccttggccgtcgccggaagcccggagaagccgggtggaactgccttttgaacgcgttctcacgtgtgttagggatcgtcctcctggaagagccttgatggccacgcggtgtcctcgcccctctctccgctggacccgaggccccttgccagcaagagctggcctggtgtccggtatccacgtggggggcagtggccctcacacaaggattggtacccatctatctagtgcgttggttcgtgcattcacttgttcctttgtggtcgttgaacgcctgtaacgttccaggtgcttgggatccatgagtgaataaaaccaagggccctgccttccttgggacttacagtccaggggagacagagccgctgatttcaggtctcatcagtaagtgacagggtgttagagggcgatagtgctgcggaagggaaagcggtaggcatgcggggggtgctgcggtgaggggcgtgggcagggagggctgggaagcccgaggtcagcgcaggccacattacaaagagactgaactggatagaggagtgtttggggagaaggaagataattccaggctgatggacgagagagtgcagaggcccagtgtgacttgtatttataaggaacagcggccgggcatggtggttcacgcctgtaatcccagcattttgggaggtcaaggtgggcggatcacttgaggtcaggggttcgagaccagcctggccaacacggtgaaaccctatctctaccaaaactacaaaaattagccaggcaaggtggtgcgtgcctgtaattccagctacttgggaggctgaggcaggagaatcgcttgaatccgggaggcggaggttgcagtgagcggagatggggccattgcactccagtctgggcaacaagagcaaactccgtctcaaaaaaaaaaaaaaaaaaaggaaagaaagaagagaaaagatagaaaacagcaagaaacccttgaatatgaaaatatgaatggaaggcaagaaagaaagaaggagggagggaagggagggagggagggaaggaaggaaggaggcagggagggaagggagagggagagagggagggaggaaggaaggaagggaggagggagggagggaggaaggaagggcagcaagaaaccactgactatgaatggaaggcgagaatcccagacttggacgcgaagtttagttcacacgcgcggccaaagcaatccaacagcatgcgtccccaccctcctctcactgcctacccctctcctgcaaaagacctcccagtgactggagtgcaggccaagactttcagacagtttaaaccattttttttttttgagacagagtttcgctctggaatgcagtggcgcagtcttggctcactgcaacctctgcctcccaggttcaagcaattctcctgcctcagcctcctgagtagctggaattacaggcgcccaccaccacgtccagctaatttttgtatttttagtagagacagtgtttcaccatgttggccaggctggtcttgaattcctgacctcaggtaatctgcctgcctcggcctcccaaagtcctgggattacaggcatgagccaccgctcccagcctcagtttaaatttctaatttgggatataatccacagaataagcaaaaggaattccaaaataaattaaaaataatttctccttggggttactgctttctttctccttagcaagataaatacaaaattttgtgtttcagaacctgatcataatgtgctatgtgaaaacaaggatgaaagattggagctatggggatagtggggtgagggcagggcatgaaacaacaaagaacaaagtatgtgtctgtatatgggtatgaaaacaaaaacaactcgcccaggactgttttttcttaagactctttacaggcatagagataatactagtagcaactacaaagaaaaaccgattagcttggcttatagtaatgagcaatgggaattttttttttttcgtttttttgctaagactgtaaaagcagaacatagtctctgagataaactgacagcagtgcagccgggcatggtggctcacgcctgtaatcccagcactttgggaggccgaggtgggtggatcatgaggtcaggagatcaagacaatcctggctaacacagggaaacctcatctctctaaaaatacaaacaaaattagctgggcggggtggcacatgcctgtagtcccagctcctcaggaggctgaggcagaatcgcttgaaccagggaggtggaggttgcagtgagcagagattgcaccactgcactccagcctgggcgacagagcaagactctgtcgcaaaaaaaaaaaaaaattgacagcagtgctaggctatgtagcagaaggtaacatcaggtcaggtgcagtggctcacacctgtaatcccagcattttggaatgcctagatgggaggactgcttgaacccaggagtctgaggctgcggtgagctatgatcacaccactgcactctagcctggataactgagtgagaccccatctcaggaaaaaaaaaaaaaaaaaaagaggccgggcgcggtggctcacacctgtaatcccagcactttgggaggccgaggcaggccgttcacaaggtcaggagatcaagaccatcctggcgaacatcgtgaaaccccattctactaaaaatacaaaaaattagccgggtgtggtggtgggcacctgtagtcccagctacttgggaggctgaggcaggagaatggcgtgaacccgggaggcggagcttgcagtgagcggagattgcgccattgcactccagcctgggcgacagagtgagacttcgtctcaaaaaaaaaaaaaaaaaaaccatcaacaacaacaaaaaaagaacgtaacatcagcaagctacagagaagagtaaagcaggagttcttggattaatctctaagaggaattgtttgtgacactgtggccccattaaagcacaaataatctggattcatgttatagatttaaacatcataagacctacacattggagagtgtaactgctggattagttctaactggttctactccgctaataatggggtatcaagttattttaccggcacagagccaagaagttgcaagtcattacagtcagaacatgtgcagaaagggagactttaacctcaaataacccgggaactaaagtcttgcccctcaacagaaccaaaagattgggacatggctggaatatgagcacaggaacactttcaaaagcaacgggtccaagcccaggaacgtccagtgataagaccctttaccatatcttaccataagtggtactgtttgaagtccttcggatcaaaacctgtcctgccagcacttccacctatgcccgtgtcctccctcacacttaaaatttgttccagactccagattgaagagacatatttgagcctgtcttcttgctcagccaccttgcaataaaaagtctggtgcttcagtgtttggctttacattgcacgtggacagaccgacctggtttggttcggtaacaaagaggagagcttgctttatttatttatttatttatttatgacaaggtcttcctctgttgcccaggctgggagtacagaggtgtggtcatggctcactgcagcctcaaactctttggctcaagtgatcctcccacctcagcctcacaggtagctagcactacaggtgagcataaccacacctggctaattctttaatttttttgtagagacaggggtcttgctatgttgcctaggttgctctcaaaccagtgggctcaagcaattctcccactttggtgtcccaaaatgctgggattataggcatgagtcaccgcacccagcttaatttttcttatatggcttaaaagccagttctaaattactttcaggctgggcatggtggcttatgcctgtaatcccagaaccttgggaggcttaggtgtaaggatcactggaggccagtagttcaagattagcctggacaacatagtgagacccctgtctctacaaaaacattaataaaaaaattatctgggtgtggtggtgtgtgcttgtagtccctgcgactcaagagactgaggtgggaggattgcttgagcccaggaatttgaggctgcagcaagctgtgatcataccactgcacttcagcctgggcaacaaagcaagaccctgtctcaatatataaataaataatttcaaaaaaggttttgaataattgtgtcatcctggaaaaagatgatagccttccaaagtggttattttgaagggtaaccttcacttgggagtataaattttcatatgcctgttatccctgtattaaaaaaaaaaactctttcagaccagcatagaagtggagttagacctgttccaaacccactgtatgaaaattaaatacaaaattggagggtagtccttcatttatggaatacccagaatatcataggctctgtgctaggtgctggagacacaagataagtacactagagcctcttaccctcaaggaatttctagtatagtgatgattacatcactgaaataattcaccaaagtgaactaatatatgcaacttcagaaatcttgtttggcataaagtgaggtagagatcatgtataacaagtaagggactgtgaagtgggataaggctagtcaagaagcctttcttagaagaaattagcttgaatgagtttttgttttgttttatttttttgagatggagtctcactctgtcacccaggctggagtgcagtcgcatgatctcggctcactgcaacctccgcctcctgagttcaagtgattctcccgcctcagcctcccgagtagctgggattataggcacccaccaccacgcccgactaattttgtatttttttagtagagacggggtttcaccatgttggccaggctggcctgaaactcctacctcaggtgatccacccgcctcagcctcccaaagtgctgggattacaagtatgagccaccgtgcccagtctaaactcagtttttcatgtttccatgccagcacccttctattgactcagtctaatagatggaggcaaactagtaaaaaggtaagtagaatacaacttatacaggaatcttgataatatcgcctcatcctttttcatattttcccccatgtttttgctatgcacataagctaaactgaaataaatagatataagacattcttttagtacaccttcactgctgatgtttttgctgtaatttttctagactagtgaggtttcagaaaaagggactgagttttaatatcaaataagcaattttccttatatatatatttttggtcactttctccagcattgctgtctttttctctccagcctttggcccttcttatcaggatgaaaacgcttctgtttggtgtctggaccctgctggccttgatcctttgcccaggtgaggctattcgggaaagctttttaaaccagtatgtgtcaggacacaggtagctggtcagtgaggaagggggtggggagtcctgagtggggtgacacttcagtgttcattcatctggacccgggggaaagattcctgtctcttggatcactaggacacagaatcgttacggtctctggcttgtatttgggataacactagttaatagactatcagagaggactctccctaggaaacatgccttctccgcttggttcccttctgccccaggactgccctgtgtttctcctcttgagaatgtttttacttctttgttgccaccgtttgtgtcatgatgaactataataggctcttggtaggacaggacccatacatagctcaggtacagaaagtgagttctcctgatgacgggaaaggaacaggggccttagcaggtaacattgctacaagagctgtgtattcccagaggggactggtattgggaggtgaagtagatggtagatatggactagctaaagaggacctgtagagaagccttcaggacttcctgaagtctccgtgccctttacctacatcaggcatctaaaatccatccgaggccaggcgtggtggcttggccaggcacagtggctcatgcctataatcccagcactttgggaggctgaggcaggcggatcacccaaagtcacgagttcgagaccagcctgaccaacatggtgaaaccccgtctctactaaaattagccgggcgtggtggcatgcacctgtaatcccagctacttgggaggctgaggcaggagaatcacttgaacatgggaggcggaggttgcagtgagccgagatcgtgccattgcactccagcctgggcaaaaagagtgaaactctgtctcaaaaataaaataaaataaagtaaaataaaataaaaatccatctgacatctcccattgcatcagagaagatttccagaacagacgaaatttgtaagcatccaaaacatccattcccttagcgccaaatcaaaatggaatggtctcactctgagaagaggcataaagaagaggcatggaaaatgagtgaccctgggagttacctgcaggccaatggatctgagaatttggtgtgcataagggtccccgggaggcttgttttattccttagcatattttcaggtcccaccttcacaggtttgaaaccatgcgctctgaggtggagttggagtctgcagtttacaagcatttaggatgattctggcaaagggaatccttagccataatttgagagagacactgctttcagggataagtaatgaagttcgaatcctgtgagggtccacagcagcctattatggggagctttcaagaattctgaaagtttaggaagatattggtttcctgggcataattttttttagcaactccataatttccatggtgatactaatagagaattcaagttctcaagaaagatgataggtggagggaatagtggtgaaatcagagctaacttgttaactacagtttttttttgtttgtttgtttgagacggagtttcactcttgttgcccaggatggagtgcaatggcacaatctcaactcactgcaacctctgcctcctgggttcaagtgattctctgcctcagcctcctgagtagctgggattacaggcacgcatcaccatgcctggctaattttgtatttttagtagagacggggtttctccatattggtcaggctggtctctaacttccaacctcgggtgatccgcccaccttggcctcccaaagtggggaggattacaggcgtgaaccaccccgcccggccaattacaggtcttttgtcctgtctggttgtctgaaccttttttttcagggcaggtttcctgttctctaacctggaactagatagaataggttctgtatttatttgggtctcgtggtcctcaccagagtcattggcatatgtggttcatttttttttttttttttttttgagatggagtcctgctctgttgccaggctggagtgcagtggcacaatcccggctcactgcaacctctgcctcctgggttcaagcgattctcctgcctcagcctcccgagtagctgggattacaggcgtgcgccactacacccagcttattttagtacttttaatagagacggggtttcatcatgttggccaggatggtcttgatctcttgaccttgtgatccgcccgcctcggcctcccaaagtgctgggattacaggcgtgagccaccgcgcctggccgatgtggttcatatttcaggggtcccggaagagttgtttgaggtttctatttggccaagtcaggccctggtggagtttggacagtccctagtggtcaactgcagcactacttgcccagacccaggacccagtggaattgagaccttcttaaagaaaactcaggtgggcaaagggcctcagtggaaagagtttcttctggaggatgtcacagagaattccatcctgcagtgcttcttctcttgtgcagggattcaaaaggacacaagccttggcatcactgtgtattgtgagtagggctgagggctgggggcagggggatggaaaggaggaatggggaaacatgaacatgtcttatttagggaaggatgggacaaatgtttctaattaggggagataattaaggcccttaataaagatttctggcatactgtagggattctagatccaatcacctttttcatttatttttttttttttgagatggaatcttgctctattgctcaggctagagtgcagtggtgtgatctcagctaactgcagcctccacctgggttcaagcaattctcctgcctcagcctccccagtagctgggactacaggcagccaccaccatgcctggctaatttttgtattttttttagtagagacaggggtttcaccatgttggccaggctggtcttgaactcctgacctgaagtgatctatctgcctcagcctcccaaagtgctgggattacaggtgtgagccacctcaagtccagcaagtagaagtgagccgggcccacttctacttccctttgatgtaggctttcttctgagttttaaattaggagcagaccatagagagcatccagattatctgtgcttgaaaatatcttcaatacaggaaacatatgctaataatgtttatggttaaattaccaaaaagtataagattagcctggccacagtggttcatgctttaatcccagcactttgggaggccaaggcaggaggatcacttgaggccaggagtttcagaccagcttgagaaacacagtgagacctctgtttctacaaaagaagtttttaaaattagccaggcatagtggcgtgcacctgtggtcccagctacttgggaggctaaggtgggaggatccccggagcctagaagttcaagcctgcagtgatctatgatcacaccactgcactccagcctgggcaacagagtgggatcctgtctcttaaaaaaaaaaagtatgaaattaatgctgaattgtttgctacaagctcttggaataaacagagattggagagagaagggtttttgtgagctggggcagcctgagaaggctccatggtagaggaggctcctgcactgccctcccccaggatagttagggtttgaattgaaggggacaggtgaggaaggcctttcaggtgggcaaataacatggacaaagatatggcacgaaagcaaatgtggtctctatggggtcagaacttggttagctatagtttggtttgtttgtttgtttgttttgagatggagtcttgctctgttgcccaggctggagtgcagtagcacaatcttggctcactgcaacctctgcctcccgggttcaagcaattctctgcctcagcctcccgagcagctgggattacaggcacctgccaccgcacctggctaatttttgtatttttagtagagactgggtttcaccatcttggcctggctggtctggaactcctgacctcaagtgatccgcttgccttggcctcccaaagtactgggattacaggcgtgagccactgcacctggcctgctacagtatagattttatgtgatgctaaggagcccccggaagctgctcttgcctctgaagcccctctggtaagagatcaatgctttccagaatggcagcaacagtcaaagcaagggactctccctcagcagtcactcttctttgctatggccatagccacttttgatgcgaagaagaagagccagaagactaactcaccccatctagggcagggatggcagaaagctgacattgctgatcagatggtttaagggtggcagtcaccttctgtgatttgtatcacctcatctttctgtcctatgctgtttctttctggagaggtgggtggcatgctcatcaagtcctgcctttttgtcttaaagagccaccagagcaagtgatcctggagctgcagcctgcctgggtggctgtggacgaagccttcacagtgaagtgtcatgtacccagtgtagcacccttggagagtctcacccttgcccttctccagggtaaccaagaactgcatagaaagaactttacgagcttggctgtggcctcccaaagagctgaagtcatcatcagtgtcagagcccaaaaggagaatgacagatgcaattcttcctgccatgcagaactggacttgagtttgcaaggtgggaggctctttcaaggcagctcacccatcagaatagtccggatctttggtgagtcagaactcaagtgcaggaggaatcctggggctcatcttgccttggcctttgggactaagttctcacggggtttagggtgaggatgtgagagtaactgagctccacctttgcttgagctttaaactcaccctgcggaagagagacattttagccccactcccttcctaccttgaagggtcctgcatgatgtgtgatttatcatggcttttctcctttctcttcttgtcctcatttttttggcagaattctctcagagtccccacatctgggtctcttcccttttggaggctgggatggcggagactgtgagctgcgaggtggctagggtgtttccagccaaagaagttatgttccacatgttcctggaagaccaagagctgagctccttcctttcctgggagggggacacagcatgggccaatgctaccattcggaccatggaggctggtgatcaggaactgtcttgctttgcatctctgggtgcaatggaacagaagacaagaaagctagtgcatagctacaataagtggcctggctcttcctttttcatacgggttctctgctgctgaaaacacagagtaacgggttggtgattcggctgtagacatccctgctgccctttgctgggtatgctctcaagtgaacatgagtcttcatctttctctggtaaatgcaggcagattggggacatgggctacagtagttctttccagccttcatccccagtttccttaggctatcctgcttacagagtgattgtggatgccctgaactacttcttagaaacacttatttgaggtgaggaggaaagctgtaagatgaaaagacatcttgcagtccttgcagcgaagcatagctaaatgtgtgcatgcataagagaagctcttgaatccccaaaccacctcattctttcttcagcttttacagaagaagcaatggtatccaaaatctttcccctgttgtctgccttcccaagggcttttaccagcagcaagagtgcagaagtgtctgctagttttgagaaatgtgtctggttctccttttcctttccttataggcttccctccaccaatcctggagctaaaagaatcatacccattggcagggaccgacattaatgtgacctgctcagggcatgtattaacatcacccagccctactcttcggcttcagggagccccagacctccctgctggggagcctgcctggcttctacttactgccagggaggaagatgatggctgaaatttctcctgcgaggcctctttggtggtgcagggtcagcggttgatgaaaaccactgtgatccagctccatatcctatgtgagtggaggcctgatctttcttgtcaaaataaggattattattttcccatttctagagagcttcttggccagcagtgcttcattattacagttgccacatttttctcattaaaaaaaaaaatcaaaggagaaaataaaaggaaagctttccaagcttaccttactcccgggaaagcaagtggggaaccagatgaggggaaattgggaacataaaggaaaggagttaaagtgatcaggcaatattaattaagggtcgatggccgaggagaacaaaggaagtgatagtgggagtttatgctgaaaagggaaatttccaaaaattccatatacacatttctattttgaagagtagagaaaataggccaggtgcggtggcttacgcctgtaatcccagcactttgggaggctgaggcgggtggatggctagcggtcaggagttcaagagcagcctgaccaacatgatgaaaccctgtctctactaaaaatacaaatattagccaggcatgatcgtgggtgcctgtaattccagctactcaggaggctgaggcaggagaattgcttgaaacctgggaggcggaggtggcagtgagctgagatcacgccactgcattctagcctggatgacaaagcgagacttcgtctcaaaaaaaaaaaaaaaaaaaaaagaaaagaaaaaatcctcatctctgagttcaccactacctagctccttacccactgagaagcaaagatgggaagcaggggccccagggccaccatggacagagcagggttatcatgtagtctgaatccgtaaaaacaccctaggttttggcggggcctggtgactcacgcctgtaatcccaacactttggaaggtcaaggcgggcggatcatgaggtcaagagatcgagaccatcctggccaacatggtgaaacaccatctctactacagatacaaaaattagctgggcatgggggcacatgcctgtagtcccagctactctggaaactgaggcaggagaatcgcttgaacctgggaggtggaggttacagtgagctgagatcgcgccactgtacatactccagcttggcgacagagcaagactccatctcaaaacaaacaaacgaacaaaaaaaacaccctaggtttcatctgggactccctaccgatagagaaggtgggaaagaagagttggctcaaagcagggagctgctagtgctcccttgggaaggaaagctgttgggtggaggggacagcatttgggtgaggggaggagagggagcagggggtgaaggtagggagggagtgtggtgcactgaactcagctctttgggaaactgtttttgcaggcaagccacagttagaggaatccagttgccctggcaaacagacctggctggaagggatggaacacacgctcgcctgcgtcccaaagggaaacccagctccagccttggtgtgtacctggaatggggtggtctttgaccttgaagtgccacagaaggcaacctagaaccacactggaacctaccgctacacagccactaaccagctgggctctgtcagcaaagacattgctgtcattgttcaaggtaacctttgctgccctgctgccaggcccaggatggaaacccctcaggagtttgggattcttatctaagcatgaaaataagaaagattctactaggttgggaagaatgagactcagaagtgggcctggtgggctggggtgggtgatccttgtactctcagactttcctaactctatcttctgtgcttgggcaggactggatgaaggaataagctctaccctctttgtcattattaccgttgcccttggagtgggtgtcatcaccatagcactgtatttgagctatcggccctgcaaagtggacaggaggaaattgctctataggcagaaagaggaggacaaagaggaggaaagccagtttgctgttcaggaagagaaaagtacaactcatataattgacaactgtttgattgaatgagacttctgctactgtggtttcccagggagggaagaagggatagaggagaaaggaagaaacacaatggcaggctgcattcccctttgtgtacgtctgtcctgtaaaacggtgtttcaggcccccatgccccatgtcctgtgtgtccaatatgtccacaagctcaccattctctctctctctctcttttcttttctttttctttttctttttttttttttttgagatggagtcttgctgttgtcgcctaggctggagtgcaatgatgcgatcctggctcactgcaactgcagcctcccgggttcaggtgattctcctgcctcagcctccctggcagctgggattacaggtgcacaccaccatgcctgtctaatttttgtacttttcgtagagatggggtttcaccatgttggctgggctggtctcaaactcctgacctcaagtgatccggccaccttggcctcccaaagtgctgggattacaggtgtgagccaccgcgcccagccacctttctctttagagctcactctagtcattaagaatctcagtctcaatgtttgatttgtaagaaggcctcttgctccttgccaggtgcttcatcagtccactcttagatacaaaaaaaagatcctgctgtttctttatggtttccactgcccttttctcttaaatatcatactaaagtcaggcacatcttagaaatgcaactcatatttcatggttttctgattactaactgggaactaaatttgtagtccagggacaggactttgaagggagtaagtatcaaatatggggctaggaatcagagctctgttcccatctccactttcccttgctcccctgacctgggcttctggagggccagctcccagagctgagcttgttgacatcattaaggatcagtggcaagcttcaactcagtaaccatctgttgtgggtcttgggggagtatacagatggtaagaaattccactttgggccagacaagcatcctatctagcccagtgttctgtctctgaagtagaaggtagagttcttccatgaaattggcctcataggttaagagctccaaacatctctgaattccttttcatagagtgatcaactgtgagttcgcatttgtcagttttttttttgtacccatgtgggtgtctaggttagagttgcaatgtttactctcccttttcatcaataaggacatattttcttctgtctgtaagcaatttccttgaagcttcaagaagaatcctcttgtgaaaatgttcatatgattttatgattctgcttccttccctgtccttgggaaagagtatattcaccctcagagaaggcgtgaggaatcaccaaaccagatcttttctcccaaatcagtcaagaaatgttcactggaatgttgctatggtaaaaataaaagtggttttatgatgtccaaatgcagttcccttcccttctgtgtcattgctgaaacctcttatttatttatttatttatttatttatttattttaagacagagtcttgctctgtcgcccaggctggagtgccgtggcacgatctcggctcactgcaagctccgcctcctgggttcacaccattctcctgtctcagcctcccaagtagctgggactacaggcacatgccaccatgccgggctaattttttgtatttttagcagagacagggtttcactgtgttagccaggatggtcttgatctcctgacttgattcgcccacctgggcctcccaaagtggctggattacaggcgtgagccactgtgcctggccgctgaaagctcttattatgtcaaatggttgcattttataactttttctttttttttttttagatggagtctcactctgttgcccaggctggagtgcagtggcgcgatttcggctcacttcaacctccacctcccagtttcaagcaattctctgcctcagcctcccgagtagctgggattacaggcacccaccgccatgaccagctaattttttgtatttttagtagagacagggtttcaccatcttgactaggctagtcttgaagtcctgacctcgcgatccacccaccttggcctcctaaagtgctggtattactggcgtgagccaccgctcttggctgcattttataactttaagtacaatttctaaggaaaaaataccgtgttgatagcataaacaaccagctcagggcagggggtgcattagctcagggcagcagcctatttgacctgctttcaaaactgaaattcaggccgggggcagtggctcacgcctgtaatcccagcactttgggaggctgaggcgggtgaatcacttgagccccggagtttgcgaatagcctgggcaacatggcaaaaccccatttctacaaaaaatacaaaactaggccaggtatactggcacgtgcctgtagtcccagctacttgagagtctgaggtgggaggatcacttgagcacaggagatggagggttgcagcaagttgagatcatgcactgcactccagcctgggcgacagagccagaccctgtctcaaaaacaaaacaaaggaaacaaaaacaaaaactaaagttcagacttccagatagagagaggtccatagccttccaaattgcagatactagctagaaaaaaccatggtatcagacagcagagggaaaatgtttttccattcttcccagacctcccctaagtctggtgttatagattaagtataaaaataaccctttggaaggccaggcacggtggctcatgcctgtaatcccagcactttcggaggccaaggggggcggatcacaaggttaggagatcgagaccagcctggctaacacggtgaaaccccgtctctactaaaaatacaaaaaaattagctgggcatggtggtggacacctgtagtcccagctactcgggaggctgagtcaggagaatggcgtgaacccgggaggcagagcttgcagtgagccgagatcgctctgctgcactccagcctggggacagagcaagagtccgtctccaaaaaaagaaaaaagaaaaaaaataataagcttttcgtttcaccacatacaaggcagtggggatacagtggtgaacaaaacattgtccctggcttccacaaatttattaggaaagcaagacaaacaagtatgtaatgaacaaaaaagttcattacatttgagcatgaactcctatgactgggaaaacagattgttaagagaaagcataactcggatcaaggaaggcttcctggagggacacgaaatatcttgactttgtaaaatagcatcatcccggaacatgaccttttcaacctcaatgtttccactaggtggagctactgctctctcatcatgtgagtctaatataaatcatccaccttccctgaattgagcatttggggaagtaagttaagaagcaggtttaagagacaggagtatagagctgccccatgcagggatccacagacatttcggtgtcaggatcagccacatcaaggctatagttatcttgtatctgcaaaccctgcctcatggcctcagtgccttgaagcacagcgaatccaaaaaggaagggaaaaatgagccaggcatgccggtgtgcacctgtaatcccagctactggggaggctgaggcaggagaatcgcttgaacctgggaggcagagttgcagtgagccgagatcgtgccattgcactccagcctgggcaacagagtgacaccccatcttgaagaaaacaaaaacaaaagcaaacaaacaaaaaacaagacaaaaccaaaaaaagagggaagaagggggccacttggactttctagttccagcagggagatcctggaggctcaaccggctgctgcctttgcttctcactgccacagggtgtcagtgtggacagatggtcccacacagtaccctcaaaccaagcgggtctgcagatctgggttcctacctgctgtggatctctgagggaggatgatctgcttcttcggggcctggtccagcagcgggtgtcctcttgctggggtttccagggttccagttcttagagctcagtagtttggatgagccgtcccgcaaagctcttcagagtaggctgggctgtttcccttgtagacttggaacctctgttcgctttccttcccgaaggatccacacaaccagtggtcaggcaggcagccccttctcattgattcttttttttcttttctttttattttttttggagacagagtctcgctctgtctcccaggctggagtgcagtggcgcaatctcggctcactgcaacttctgcttcccggcttcaagcaattttcccttctcaacctctagagtagctgggattacaggtgtctgccaccacacccggctaatttttgtgttattagtagagacagggtttcatcatgttggccaggctggtctcaaactcctgacctcaggtgatctgcccaccttggcctcccaatgtgctgggagtacaggcgtgagtcaccacgcctggcttcattgattctgaaagcaggaagggtctcatatctcttttccagtatgatagagcttctaagggtagctgcctcattgtctataggaggaggccccacccctaaatgattttgatcatattctttctgaacattaaagcaaccagctcacgcttaaattgcaggtatcttgattatctccagaggaagagtggcctttaatactccaaaattttatcctctttcttattatttttgagagagaatcttgctcagccacccagctggagtgcagtggcatgatgggctcagcgcaactctgcctcccgggctcaagcgattctcgtgcctcagtagctgggaatacaggtgtgcaccaccacacctggctaatttttgtatttttagtagagacggggtgccatcattttggccaggcttgtcttgaactcctgatctcctcccgcctcggcctcccaaagtgctgagattactggcttgagccactgtgcctggcagtttatcctctcaaggatggtcagggtgacattctggcgtctttgtctttagacctgagaaagagtaagttacatctttagtgggacttcttaccataggattaataatagtatttaccttagaagattatacttagaaagaaatgacataatacttgcaataaactagcatgttgctggagacatgtgtttacatttgttggtttttgtgattacactgataattctggtggtaattaagcacatcattataatcacagtaaactcaaagcaagaatcagaaatccatggtaaccttgagcaccatcaaaagtcatatacaccgtgtgcagctttctgatttttctactctttttcttgctccttcccctactttccccccagtttggtcccctaagatttaggactactaatagggtgaccagtcctgtgagctgagtttgcattgagctgagggattcctggaaggaatgtgggacttccagtgttgacattgagaaagtctcctgcaaaccaggacgagttggtgaccctaatcccagcggtgctcattgtgtgcctcagcactccagggccttctgaattaaagaagcatccaggcaaagtgtcagcttgtcttggcctagaagcccagaccctataattcagaagaaaagggaaggggtcagttctgctctcaactgtgtataaagggacaaaacccaccatgtgtatttggacaatgctcatggaagaaattcagaagtggtcattttaggttagggtaaattcaaaaaaaatgacagagtcagtaaaacattatgccaggggtcaaggatgactggagctctgcctgctgaactcttccttgtgtgagtcttgctaatcttatcttcaggaagagttttcattagaaaataccaataagagccaggcctggtggctcccgcctgtaatcctatcactttgggaggccaagaagggtggatcacctgaggccaggagtttgagaccagcctggccaacatggcgaaaccctgtctttaccaaaaatacaaacatctgccctgtgtggtggtgcacgcttataatcccagctactcaggaggctgaggcatgagaatcacttgaacccgggaggaggcggaggttgcagtgagccaagatcccaccactgcactccagcctctgtctcaaaaacaaaaacaaaaataaagtattaacaatttttagttgtgagaagatataaacgtttccatcttaaccattttacgtgtacagttcagtcatgtcaagtacattgacatcgtcatgcaaccctcaccaccatccatctccagaacccttttcatcttgcacagctgaaaccctgtgctcattaaatagctccctattccatccctccccacagccactggcagccaccatcctactttttgtctctatgaatttgactgctctgagtacctcatctgactggaatcagagagtatttgtctttttgtgactggctcatgataaacactttttagatgactggttggaattaggagcaggtggcaccacaactggcccaggcctctcatctcctttttctcctttctccctattccaccagtacaacagctgtgaacacatgggtctcatctttgcggtccctaacacagtggttctcaaccttgtttacatgttagaatcacctgggaaagttttcaaactactcttgcctggaccacattccagtctaattatatcagaatctcagggagtgagggctcacgtatgcatcgtttagaaaacatcctaggcatctcaaatttgcagcagaaattgccgtccacaccaagttgatgagctgaaatgtagactaacagtgggtaaatcagagtttaaagtagatggtctttaaggtctttttatgttctaaaatgtgcaaagtcagctagtatctaattctcaaccagcagtggttgagtggattctcctacacccgaggggagctgggtggacagtctctggcatgtggctccccctgcagttcagttatatgttatgaccaccccactttagaaccctcttagccacccaagtaggcgctggacattgtcattccactgtcacgtgcattcaacaaatacttattaagatggctcacaattccttttaaaacacgcaagctgagagataattataattgtgctcattccatcgacttctaaagactgagatttctaaataattttaaggccaaatgaaggacattgcaggaatattgattccagctttgtgcaagaaatagttttttgcaatgagagtggtttaatagaatgaggagccttgtgaaagtgattcctttggttctagtgctacacactcataattggaatactgactgtaatggacgccgtaggataagattcccaaagtagaagaaactagactgacttatgaggcccttctaactccaaaatgccataattttaaagcccgatagtagaagaatgatgtaagatgaagaaatgtcttctgagctgagaaatgcagcagctctagagttctgattatttcaactttcaaccacttcccaaggactgagttattaactgtaaaatagccaaaaatgaacacaagtggttctcgttatcaagaaaattcatgatagcacataagaatcagaacttctaaagaagattaattagggggttgattatttgcattgcaaaacaattcctgacttcatgaaatcatttttggatactagagttcctgtgagcatcttagcatcgatttataggtcaccagtcacttagccaaggtgcttgggagagtaaactcttaactaaccaccgctctttagtgcttatttggaaataataaacatctcagatgtttactatttcctaattgtcattaggaaaacaatataatttcactacaggtatttagacactccatcagaaaacacaaaacatccaaaaattcaatgcagaaataactacaatttcttgagtactataatatgtcaaaaataccattgcatttatcctcacataatccttgtaaagcaatatattattatctcagcttggtcaagtaatttattcagcagcactaaattgcatacagcccaaatctttctgattctttcccttacaccaagttaccccaatcaacatctcttagaataaaattgctcacagacagcttggagaccatgtgtgtttgggttaatttttgcccttaaaagattttcaatatgtgttgccagtgtttaaatgttagaattcctgtaaaagtctggatgtcctggctgtctcaaagaatcagaaggtctggaagccgtgtcccttcagtcctgatggtgacaggctgggtgggtcccacctcagcaggggcttgagttctgcagattgtgctggttcccacccctctgtgttgcatcccctgaagggaagcgagtgtcatctgggatttatcccctcccatccagccctcattgcttacgttgttatctacctggcacctgttggcactgcatttacaaccccaaataaaatcactcttccacttcccttgccctaattcagattccaaatgctctggttctgtatgtctcaaactcatttttgcattgttctcatttcccgagagtagttgggcttaaggaatattcatcctaaaattcttctgaacacaagtaattctatgccattgtttcctcacctgttggggagtttttgcctctgcacttaatagcccatcttgttttcatttcttcccgctcctggagggctaggtttggtgttgctggtgatggtgggggaggaagaaatgccttcaagtcatctctgggatgaccaatgagctgtgaccagcaagctgggaccactgagctggtggaatggccttagtgagtaatagcggtgatgtgtcagcctttttctggcccaggaacagccaagcctcttatatttcagcggcctagttcccaatagaccttgaaggccctccaggtcttctttccacctaccccttgctccataccaccaccttccaccccataatattatagaatgacacctagtcagatgaaatgatacaacttaattttattaggacaaggctgatgggcactggagtggcaccttccagggccaggagaggcactggggaggggtcggtcacaggatgccacgcgggcacctagaagccacagctaccctctacagagcggcactgcaccatgcgcaggaatgtctcgaccttgtccatgtccttcctgaagcagtagagcagcccgtagttcttgagcagtgcgtcatggttgtgtgagtttgtgtcaaacttgctgtaggtctgcttgaggatctgcccagtccggcggctgccgtcttccagcctctgcaaagtgaaggaagagaaggagaggccaagcgcttgggcactgttccctccctctctcattcatccattttcctccctccccttcagggtgtagagaagggcctggaggattcaccaggcgaaatgaagaataaggtgagttctcttgggtcagcgcctgactgctacaaagagggcagcagtgtttctctcccccagccctctaagccagtggggttccaggattggcgacccctggcgccaccctcacccccatcagcgtttggatgccttcctctaggtcctttaggaggtgatagtcatcgctgtccgaggtgtcatacaccaggttgttggcgaacatactcctgaggaaccgcacgggctccagccacgactcgatgagcagcagggagatgcggagcagctctagattctgcaggggaaggaccggcagtggctgtgctgcccgggagccctgaccacaggtctcccccatccccgcctaggggagacggcatccactcacggatttctgttgcgtttcctccatgttggagggtgtcggaatagagtctgagaagcagaaggaggtctgggagtcatgcaggaatgaatacttctggtcctttgggatataggtttcttcctaggagaaggaccccccaccaagaaggactgctggtttctatgctggagaccagctcccattgttgcttttctgggaacctggctcagcctatgctcatctgcctgcattttcgcttcagaaaacaaccctgagctccttagtctcctcccattacttccccagtgggggaaagtcaccccttcttgccacccctgacccgcacccattccccaagaacttacaaactcctggtaggtgtcaatggccagctggtgcgcgcgatgggcttggagcatagcgtggtcaaaaagcctggataacggaacggtttggacggcaccagcctcttgaagccagggcaggcagagcagggcaaaagccaggagcagggacgtccgggagcctggggagaaaccggagggcaatggagggagccggagaggaagaggccagcgctctccctgctccaggagctgtttgtttttttctctctctccatccctccagagaccaggaacattcagagattggccaaatatctggccttagatggcgatactcacattcataagccccaaacctgagggttagtgcccccgtcccatctacagggcgctgcctctcccctcaggacacgttgtgcccaaagggattttaggggcgcttacctgcagccattgccgctaggtgagctgtccacaggaccctgagtggttcggggagttgggccttgggatcctagagccggtctcttgtgggccctttttataccctggccagttctctctccctgcttgaccccacctgtttctgtgtacatttatgcatggggccactgacgggcttgtgctaatggataatttggaagctcctcccacacatgctgggatcatgccccctggcttgtcgtctttcccttctcaccatcaccagtgttgtaaggattgtgcacagagtgtcagccacagactccacccaacttgtcctctctttaagggtcaggtgggtgccctctggccgcaggccatgttggtcaacctgaatgcggggaaggctgtcaggatagccagtccttgagacccctaccgaccccattccactctctatcctattcctttcctcctccccgcgtgtttaacttccacccaccagacagaatgtgtgtgttgggaaaaggggccaagcacagccaatagattgtgggggttctgagcaccattgagtcctgaattccacttttgctgatgactcctgggcccacctgagtcagctggatgcagtgctaacactgaccactagagagaaccaaccccacacattgctctcccctttccctgaaccttggggcggaggcggtggggctcccccaggtcactggggacgaagaacccagactcaaggtattgcctcagctccttggacctgcagcagagacacaaaccaagaaacagaaatcccgggaacagacacggaccacaagcgcttcctcccacagccctgaaaccatcagagaatctcaaggttggaagagctcttgaagatttgagtctcaggggaacatcacactctggggactgttgtggggtggggggaggggggagggatagctttaggagatatacctaatgctaaatgacaagttaatgggtgcagcacaccagcatggcacaggtatacacatgtaactaacctgcacattgtgcacatgtaccctaaaacttaaagtaaaagaataataataattaaaaaaaaagaaaaaaaagatttgagtctcttcccagctttggaactcagaacacatcacgccgaaagatgccctatccagccatggaagcccgtcctcttttgtctcttcctcctttccagacctgtgtagagcttatccagttgtcaaaggcctgcctgtgcattctcacgtctgatctgccacttgtcttgtgtaggaggtatgagtatcatcccatttcacagatcaggagactgaggctcagagagactgattacatgagctacctcagccagggcagcagatctccacaaccttgctcttcccacattgcatcatttaaagtcctttctccaggccgggcacggtggctcatgcctgtaatcccagcactttggaagactgaggtgggtggatcacttgaggtcagttcaaggccagactagccaacatggcaaaactccatctcttaaaagtacaaaagtagctgtgtgtggtggcagaagcctgcaatcccagttactccggagggtgaggaggtagaatcgcttgaacccaggacgcagaggttgccgtgagccaagattgggccatggcactccagcctgggcgccagagtgagactccatttcaacaaccacaacaacgacgacaacaacaacaacaacaacaaaagtcctttctccagagcaggtggtgtggtgctactcagttatttagttattttagtttcttttctttccttctttctttttctttctttctttctttcttttctttcttgctttcctttttctttctctttctttctttctttttctttctttctttctttccttccttcctttcttccttccttccttctttccttccttccttctttctttctttttctttctttctttctttctttctttctttctttctttctttctttctttctttctttccttccttcctttcttccttccttccttctttccttccttccttctttctttctttcttgtttttgatggagtctcattctgtctcccaggctggagtgcagtggcatgatcttgcctcactgcaacctccacctcctgggttccagtgattctcccgcctcagcctcccaagtagctgggattacaggtgcccaccactatgccgggctaagttttgtacttttttagtagagacggggtttcactatgttggccaggctggtctcgaactcttgactttaggtgatccaccctccctggcctcccaaagtactgagattaatggcgtgagtcaccgcccccaacccagttatttcagcttctaaatctctctgagtgcagggatcctgtccccaacacaaggggccctttgcctgattttgtctttccataaggggcagattgttctttctcaattcccaggtgagaatggcccagtggcatggggtgccttgtggaaacctcgtagcaggacaaggtgaaggcagagaaggccaggactgagcctcctgtctcctggtgcccagggttggggctatttccataccacctggaggtcacaagcatcagatgcccccagagatgagagcaggaaagaacaccctctgtagtggtgaaatcttctcccaccctgagtttaagagcatgtagcacttgatgctgtagaaacacaagcaagcaaacaggcaaatgcttctagaagtggttggctgtggtgttggcaaccaacattgaaaacccacacccctgtggcctaggatgtgaatgctggggccctgccatctccccactttcagagcggaagacagagctcctttttttgccatcattcctgaagcattaccggaccagcaccccagactcatcacctgctgggagggcactgtgctgtgggctgttctccagggaagcctgtgtgaggatccaagaggggtgtcatcaatgataccagctctgagaaatatggggtcaagggagggtggtgtcaccactttcccctgctcctcccagcaccagcaaagaggaggagccaggtgggaatggaagtgggtccctgagctccaagtagaagagggtccctgcctccctcaccatccttcttccaatgtcagctgggacagggagcccccatgacaggaccttttagccagttctggggacttagatgtggatttttggccattcgtaagggaagcctcccttaggaatgaggggggcaggggctctagctggggactactgcataactccacaggtgggcacaggggtgccgaggttactgccaggaacatgtgggaccagccagggaaggggagtgtctcctctcacctctccacttctgttgaccccagagttatagtgactcagaggacgttagggacccctggggaaacacctttataaggggttaccatggcaaccatggaccagagggaagaactgaggcccacaggtgtgggtagaagttggtgatccttttctctagtctagatcttcccttgagcaatggagaccatgtctatcattcattgctagtaaaaaatcaactttgaattagacttgggattctcctgacagtactgggaagttgcccactgttggggcatcacttgaggccagatccctcgctgctgcaggctgaaagactacccaacaagagcctccacatggccagtggggagaggctgggctttgtacctctagcatcagcctcaaaaggctctggataggtcgggtgcgttggctcacacctgtaatcccaccactttgggaggccaaggtgggtggatcattaggtcaggagtttaagaccaacctggtcaagatggtgaaatcccgtctctactaaaaatacaaaaattagctgcgcgtggtggcaggcgcatgtaatccgagctactcaggtggctgtggcagggaattgcttgaacccgggaggtggaggttgtagcgagccgagatcatgccactgcactccagcctgggtgacagagtaagactctgtatcaagagaaaaaaaaaagctgatgataatctcacaatcatcttgcttcttttaaggaacctccctttataatttaggatccatgaatttatctgtgtgtttggaagcccttcctatgtccaacctcgactaactctagggttctgtgtgcctgctgtggaaagtcacagatctgctgttgatcctaaagtggtgtctttcaggcttcaagatctcctgttaggttcaagactgtggggttgaggacgatcacatttttcgaagccattctcaccggtctcaggaatcgcctccgagggactggtgggtgctccttccactctcactttggtgatttgaggcgcacacttctcacctgcagctctgttctttcttccttgagatcagaggctggttattgtactgggacatactctacctccttttggcttctaatgtcctttctatgagtttgctactgagtcaattactcggctcattggattgaggtcttcagagaatattatatggggattcccaagggctctcctaggggaggtgaggaagatgatcaatacttctgtgtgtccaccatgtgcttggcactctactgaccatagggatgtgagtgaggatactgaggcccaaagagataagatggtttgcctggagctctcccagttcctaagtaatggcttccaaggcccctgggctttccttccatgccaagctctttagaaacctcatctagtaaagatggtggcactaataggcatggacagaacttgcctcagtgcaaagctagcaggacaggggtcaagtccctgcacagaggatgttcaatgaagatggggggaattgaacacaaggaacttcagccacagaatgaggtgtccataggcattaagaaaagtggtagaaaagaggcacccaacgtagctcgggttagtgaaccgaggcacttcatgctgcatatttgtattgcacatttcagtgtacatcgtgtttcgcttcctgtatgtcgttggacccttcagtttgccacatgatatgtccagggggttcaggcacggaggaagggcctcggaaggtctggggaggcaaggggcaggcaccgctgtgtattgatggggggattgtttgcactggttgatgatctctgaacaaccaagaagtacacaaggatctacctaacctgacgtgctaagtaatttcactttggggattattctccagggagacaatccattgatagagaagtgaaaagcatcgagatgtgtctagtagttgtaggaagtctggggtgctttcctgatggggtgccctcagctggaaatagcctctccttcctttgacctgtcctgtggctatttgcagacatttttattccccttaccagactgtaagctctttgaggctggatttctttctttctttttttttgagaccgagtcttgctctgtcacccaggctggagtgcagtggcgcgatctcggctcactgcaagctctgccccctggggttcatgacattctcctgcctcagcctcccgagtagctgggagtacaggcacccgccaccttgcccagctaatttttttgtatttttagaggtggggtttcactgtgttagccaggatggtctcgaactcctgacctcgtgatccacctgcctcgacctcccaaagtgctgggattacaggcgtgagccaccgcgccctgcctgaggctggaattctgcctttcgtctattcattcattcactcattcttctattcgtgcattcaccaattccacaagtagttgttgcctataacatgtgccagagattgtaccaggcagatgggcatatctagataaacaaaagacatgatcctttctcttctggagctaacaatctactgggggccgagaaaacagcaaaaaagtaaatatataacggtaaaatagaaatttcgaattggaaacattcccatgaagtaaaaagctaagatacggagggagagaataagccagaaggtgatgggatgaggcagctgacacagccccaggcccaggaattcaacaagcatctactgagtggacccaatgcatgagaggacagtgccaagcaaacaactcaaatgtccaactggctgggcatggccaggtagcccatgctgtgtctggacgtccttctgctggtataattattttaaaatcacaggacagggaagggcccagtggctcatacctgtaatcccagcaatttgggaggccgaggcgggcggattacctgaggtcaggagatggagaccagactggccaatatggtgaaaccccgtctctaccaaaaatacaaaaattagctgagcctggtcgtgcatgcctggaatcccaactattcgggagactgaggcaggagaatcgcttgaacccaggaggcggagattgcagcgagccaagatcgtgccactgcactccagcctggttcccaatagaccctgaaggccctacaggttgtcttcccaacctgccccttgctccataccacccgcctccaccccataatattatacaaggacacctagtcaaacaaaatgatgcaacttaattttattaggacaaggctggtgggcactggagtagcaccttccacgaccaggagaggcactggggaggggtcacagggatgccacccgggcagctagaagccacagctgccctccacagagcggcactgcacgatgcgcaggaatgtctcgaccttgtccatgtccttcctgaagcagtagagcagcccgtagttcttgagcagtgcgtcatcgttgtgcgattttgtgtcaaacttgctgtaggactgattgaagatctgcccagtccgggggctgccatcttccagcctctgcaaagtgaaggaagagaaggagaggccaagcgcttgggcactgttccctccctctctcattcatccattttcctccctcccctccaggttgtagagaaaggcctggaggattcacgaggggaaatgaagaatacggtgagttctcttgggtcagcgcctgactgctaaaaagagggcagcagtgtttctctccccagtccctggaagccagtggggccccaggattggggatccctggtgccaccctcacccacatcagcgtttggatgccttcctctaggtccttcaggtggcgatagacgttgctgtccgaggcgccatacaccaggctgttggcgaagacgctcctgaggagctgcacgggctccagccatgactggatgagcagcagggagatgcggagcagctctaggttctgcaggggaaggaccggcagtggctgtgctgcccgggggctctgaccacaggtctaccccatccccacctggggagaaggcatccactcacagatttctgctgcgttttcaccctgttggaaggtgttggaatagactctgagaagcagagggaggtctgggggttctgcaggaatgaatacttctgctccttcaggatataggcttcttcctaggagaaggaccgcccaccaaggtctatgctggagaccagctcccattgttacttttctgggaacctcactcagcgtatgctcatctgcctgcattttcacttcagaaaacaaccctgagctccttagtctcctcccattacttcccagcgggggaaagtcaccccttcctgccacctctgaagcgcacccattacccaagagcttacaaactcctgataggtgtcatatgccagctggtacaggcgacgggcgcggagcatagcgttgtcaaaaagcctggataagggaatggttgggaaggcactgccctcttgaagccaggacaggcagagcaggccaaaagccaggagcagggacgtccgggagcctggggagaaaccggagggcaacagagggagctggagagcaagaggccagcgctctccctgttccaggagctgggtttttttttttctctctctctctctgcctccctccagggaccaggaacattcagagattggccaaatactgggcttagatggcgatactaacattcataagccccaaacctgagggttagtgcccccgtcccatctacaggacgccgcctctcccctcaggacacattgtgcccaaagggattttaggggcgcttacctgcagccattgccgctaggtgagctgtccacaggaccctgagtggttcggggagttgggccttgggatccttgagctggtctcttgtgggccctttttatacctggccccttctctctcgctgcttctcctcacctgtttctctgcatgtttaggcctggggccactgacgggcttgtgctaatggataatttagaagctcctcccacacatgctgggatcatgccccctgacttgtcatctttcccttcccaccatcaccagcgttgtgagggttgtgcacagaatgtcagcagagataccacccaacttgtcctctctttaagggtcacgtgggtgccctctggcagcaggccatggtggccaacctgaacgcggagaaggatgtcaggatagccagtccttgagacccctaccgaccccatcccactctctatcctattcctttcctcctccccgcatgtttcccctccacccaccagacagaatgtgtgtgttgggaaaaggggccaaagcacagccaatagattgcgggggttctgggcatgattcagtgctgaattccacttttgctgactcctgggctcgcctgagacaggcccgcctggatgcagtgctaatactgaccactagagggaacaaactccacactttgctctcccctttacctgagccttggggcgggggcgggggcggggcgtggggatgggggtgggggtgggggtgggtgtgggtgtgggaggggtggggggggggctcccccaggtccctggggacgaataacccagactcaaggtattgccccagctccttggacctgtagcagagatacaaaccaagaaacagaaatcccgggaacagacacggaccacaagcgcttcctcccatagtcctgaaaccaacagagaatctcaaagttggaagagctcttgaagatttgagtctcttccccagctttaaaactcagaacacatcacgccaaaagacgccctatccagccatggaagcccctcctcttttgtctcctcctcctttccagacctgtgtagagcttatccagttgccaagggcctgcctgtgcattctcacgtctgaactgccacttgtcttgtgtaggagctatgactatcatcccatttcacagatcaggagactgaggctcagagagactgattacatgagctacctcagccagggcagcagatcttcacaaccttgctcttcccacattgcgtcatttaaagtcctttctccaggccgggcacggtggctcatgcctataatcccagcactttgggaggctgaggtgggtggatcacttaaggtcaggagtgcaagaccaggctaacccacatggcaaaactccatctctcctaaaaatacaaaaattagctgggcatggtggcacgagcccgtaatcccagctacttgggaggctgaggcaggagaatcgcttgaacccaggaggcagaggttgctgtgagccaagattgcgccactgcactccagcctggatgacagagcgagtctacatctcaaaaaaaaaaaaaaaaaaaatcctttctccatagcacgtagtgtggtgctactcagttatttagttattttagcttcatttcctttttttttttttttgagatggagtctcattctgtcacccaggctggagttcagtggcatgatgttgcttcacagcaacctccacctttgggttccggtgattctcccgcctcagcctcccaagtagctgggattacaggcgtccaccactatgccgggctaagatttgcacttttttagtagagacgggggtttcactatgttggccaggctggtctcgaactcttgactttaggtgatccaccctccctggcctcccaaagtactgagattacttgcgtgagccactgctcccaacccagttatttcagcttctatatccctctgagtgcagggatcctgcccccaacacaaggggccctttgcctcattttgtctttccataaggggcagattgttctttctcaattctcaggtgagaatggcccagtggcatggggtgccttgtggaaacctcagagcaggacaaggtgaaggcagagaaggccaggactgagcctcctgtctcctggtgcccagggttggggctacttcaatataatctggaggtcacaagcatcagatacccccagagatgagagcaggaaagagcaccctctctagtggtgaaatcttcccccctgagtttaagagcatctagcacttgactctgtagaaacacaagcaagcaaacaagcaaatgcttccagaagtggttggctgtggtgttggcaaccaacattgaaaacccacacccctgtggcctaggatgtgaatgctggggccctgccatctccccactttcagagcagaaaacagagctccattttctgccatcattcctgaaacattatcggaccagcaccccagactcatcacctgctgggagggcactgtgctgtgggctgttctccaggcccgcctgtgtgaggatccaagaggggtgtcatcaatgataccagctctgagaaatatgtggccaagggagggtggagtcaccactttcccctgctccttccagcaccagcaaagaggaggagctaggtgggaatggaagagggtccctgagctccatgtagctttctgcctcccccaccatccttcctccaatgtcagctgggacagggagcccccatgacaggtccttttagccagttctggggacttcgatgtggattttcggccatggaagaagtctccagcctcccttaggaatgagggtggcaggggccctagttggggaccactgcataactccgcaggtgggcacaggggtggcaaggctccccaggcaggttactgacagcaacacgtgggaccagccggggcaggggagtgtctcctctcacctctccacttctgttgaccccagaattatggtgactcagaggactctagggacccctggggaaacacctttataagggattaccatggtaaccatggaccagagggaagaactgaggcccacaggtgtgggtagaagtcaatgatcattttctctagtctagatcttcccagagccttgagcaatggagaccacatccatcattcattgctagtaaaaaatcatctttgaattagacttgggattcccctgacagtactgggaggtcgcccactgttggggcatcacttgaggccagatccctggctcctgcaggctgagagagtacccaacaagagcctccacatggccaatggggagaggctgcgctttgcacctctggcgtcagcttcaaaaggctcaggataggccggcgtggtggctcatgcctgtaatcccaacactttgggaggctgagacatgtggatcacctgaagtcaggagtttgagaccagcgtggccaacatggtgaaactgatctctactaaaaatagaaaaattagccgggtgtggtggcatgcgcttgtaatcctagttactggagcggctgaggcacaagaattgcttgaacctgggaggcagaggttgtcatgagccgagatcgcgccactgcactccaccctgggcgaaggagtgagactgactttgtctccaaaacaaacaaacaaccaaaaaaaaccaaaaagaaaagtagaaaaatcctcatctctgagttcactgttacctagctccttacccaccgagaaacaaacatgggaagcaggggccccagggccaccatggacagagcagggttatcatttagtccaaatccataagaacaccctaggtttcatctgggactccctgcccatacggaaagtgggaaagaagagttggctcaaagcagggagctgctagtgctcccttgggaaggaaagctgttgggtggaggggacagcatttgggtgaggggaggagagggagcagggggtgaagtagggagggagtgtggtgcactgaactcagctccttgggatactgtttctgcagaccaaccacggttagaggaatccagttgctctgccaaacagacctggctggaagggatggaacacacgctcacctgcgtcccaaagggaaacccagctccagccttggtgtgtacctggaatggggtggtctttgaccttgaagtgccacagaaggcaacccagaaccacactggaacctaccgctgcacagccactaaccagctgggctctgtcagcaaagacattgctgtcattgttcaaggtaacctttgctgccctgctgccaggcccaggatggaaacccctcaggggtttgggattcttatctaagcatgaaaataagaaagattctactaggttgggaagaatgagactcagaagtgggcctggtgggctggggtgggtgatccttgtactctcagactttcctaactctatcttctgtgcttgggcaggactggatgaaggaataagctctaccctctttgtcattattaccgttgcccttggagtgggtgtcatcaccatagcactgtatttgagctatcggccctgcaaagtggacaggaggaaattgctctataggcagaaagaggaggacaaagaggaggaaagccagtttgctgttcaggaagagaaaagtacaactcatataattgacaactgtttgattgaatgagacttctgctactgtggtttcccagggagggaagaagggatagaggagaaaggaagaaacacaatggcaggctgcattcccctttgtgtacgtctgtcctgtaaaacggtgtttcaggcccccatgccccatgtcctgtgtgtccaatatgtccacaagctcaccattctctctctctctctcttttcttttctttttctttttctttttttttttttttgagatggagtcttgctgttgtcgcctaggctggagtgcaatgatgcgatcctggctcactgcaactgcagcctcccgggttcaggtgattctcttgcctcagcctccctggcagctgggattacaggtgcacaccaccatgcctgtctaatttttgtacttttcgtagagatggggtttcaccatgttggctgggctggtctcaaactcctgacctcaagtgatccggccaccttggcctcccaaagtgctgggattacaggtgtgagccaccgcgcccagccacctttctctttagagctcactctattcattaggaatctcagtctcaatgtttgatttgtaagaaggcctcttgctccttgccaggtgcatcatcagtccactcttagatccaaaaaaaaaaaaagaaaagatcttgccgtttcttcatggttctcactgcccttttctcttaaacatcatactaaagtcaggcatatcttagaaatacaactcatatttcatggttttctgattactaactgggaactaaatctgtagtccaaggacaggactttgaagggagtaagtatcaaatatggggccaggaatcagagctctgttcctatctccactttcccttgctcccctgacctgggcttctggagggccagctcccagagctgagcttgttgacatcattaaggatcagtggcaagcttcaactcagtaaccatctgttgcgggtcttgggggagtatacagatggtaagaaattccactttgggccagacgggcatcctatctagctcagtattctgtctctgaaggagaaggtagagttcttccatgaaattggcctcataggttaagagctccaaacatctctgaattccttttcatagagtgatcaactgtgagttcgcatttgccagttttcttttttttacccatatgggcatctaggttaaagttccaatctttactctcccttttcatcaataagtgcatattttcttctgtctgtaaacaatttccttgaagcttcaagaggaatcttcttgtgaaaatgttcatatgattttatgtttcagcttctttccctgtccttgagaaagagtatattcaccctcggagaaggcgtgaggaatcacagaaccagatgttttctcccaaatcagtcaagaaatgttcactggaatgttgctatggtaaaaataaaagtggttttatgatgtccaaatgcagttcccttcccttctgtgtcattgctaaaagctcttatgtcaaatggctgcattttataacttttttttttagatggagtctcgctctttgcctaggctggagtgcagtggtgtgatttcggtccacttcaaactccacccccgggttgaagcaattctctgcctcagcctctatagattaagagtagctgggattacaggcgcccaccaccatgaccagctaattttttgtatttttagtagagacagggtttcaccaccttggccaggctgatcttgaagtcccgacctcgtgatctacccacctcggccttctaaagtgctgggattacaggcctgagccatcactcccggctgcattttataactttaagtacaatttctaaggaaaaaataccgtgttgatagcataaacaaccagcccagggccgggggtgcattaactgagggcagcagcctatttgacctgctttcaaaactgaaattcaggctggtgtggtggctcacgcctgtaatcccagcactttgggaggctgaggcaggtgaatcacttgagccctggagtttgcgaatagcctgggcaacatggcaaaaccccatttctacaaaaaacacaaaacttagccaggtatagtggcacatgcatgtagtcccagctacttgagagtctgaggtgggaggatcacttgagcacgggaggtggagggttgcagcgagttgagatcatgcactgcactccagcctgggcaacggagccaggccctgtctcaaaagcaaaataaaggaacaaaaatgaaagctaaaggtcagacttccagatagagagaggtccatagccttccaaattgcagataccagctagaaaaaaccatggcatcagacagcagagggaaaacgttttcccattcttcccagacctcccctgagtctggtgctatagattaagtgtaaaagtaaccctttggtttcaccacatacaaggcagtggggatacagtggtgaacaaaacattgttcctggcttccaaaaatatattaggaaagctagacaaacaagtaggagattacatttgtgcatgaactcctatgactgggaaaacagattgttaagagaaagcataactcggatcaaggaaggcttcccggagggacacgaaatatcttgactttgtaaaatagcatcatccccgaacatgaacttttcaacctcaatgtttccactaggtggagctactgctccttcatcatgtgagtctaatataaatcatccaccttccctgaattgagcatttggggaagtaagttaagaagcaggtttaagagacaggagtatacagccacaccatgcagggatccacagccattttggtgtcaggatcagtcgcatcagggctgtagttaccctgtatctgcaaaccctgcctcatggcctcagtgccttgaagcacagcgaatccaaaaaggaagggaaaaatgagccaggcatggtggtgtgcacctgtaatcccagctactggggaggctgaggcagaagaatcgcttgaacccgggatactgaggttgcagtgagccaagattgcaccattgcactccagcctgggcaacagagtgacaccccatcttgaagaaaacaaaaacaaaagcaaacaaacaaaaaacaaaacaaacaaaacaaaaaaaagagggaagaagggggccacttggactttctagttccagcagggagatcctggaggcttagccggctgctgcctttgcttctcactgccacagggtgtcagtgttgacagatggtcccacacagtaccctcaaaccaagcgggtctgcagatccgggttcccagctgctgtggatctctgagggaggatgatctgcttcttcggggcctggtccagctgcgggtgtcctcttgctggggtttccagggttccagttcttagagctcagtagtttggatgagccgtcccgcaaagctcttcagagtaggctgggctgtttcccttgtagacttggaacctctgttcgctttccttcccgaaggatccacacaaccagtggtcaggcaggcagccccttctcattgattcttttttttcttttctttttttttttttttggagacagagtctcgctctgtctcccaggctggagtgcagtggcacaatctcggctcactgcaacttctgcttcccagcttcaagcaattttcctgcctcagcctctggagtagctgggattccagatgtgcgccaccacacccggctaatttttgtgttattagtagaaacaggatttcatcatgttggctaggctggtctcaaactcctgacctcaggtgatctgcccagcttggcctctcaaaatgctgggagtacaggcgtgagccaccacacccggcttcattgattcttaaagtaggaagggtctcatatctcttttccagtataatagagcttctaagggtagctgcctcattgtctataagaggaggccccaccctctaaatggttttgatcatattctttctgaacattaaagcaaccagcttatgcttaaattgcagctaccttgattatctccagaggaagagtggcctttaatactccaaaagtttaccctctttcttactatttttgagagagaatcttgctcagccatccagctggagggcagtggcatgatgggctcagtgcaactctgcctcctgggctcaagtgattctcgcgcctcagtagctgggaatacaggtgtgcaccatcacacctggtaatttttgtatttttagtaagagacggggtgccaccatgttggccaggcttgtctcgaacttgtgacgtcctcccgcctcagccctccaaagtgctgagataactggcgtgagccaccgtgcctggccgtttatcctctcaaggatggtcagggtgacattctggtgtctttctctctagacctgagaaagcataagttacatcgttagtgggacttcttaccataggattaataatagtatttaccttagagaattataattagaaagaaatgacacaatacatgtaataaactagcatggtgctggagatatgtgttcacattagttgttttttattattacactgataattctagtggtaattaagcacatctttataatcacagtaaactcaaagcaagaatcagaaatccatgataaccatgagggccatcaaaggtcatatacaccgagcacagctttccggtttttctagtctttttcttgctccttcccctactttccccacagtttggtaccctaagatttaggactactaatagggtgaccagtcctgttagctgagtgttcattcagctgagggatccctggaaggaacgtgggactttcagtgttgacattgagaaagtctcctgcaaactaggacgagttggtaaccctaatcccagcggtgctcattgtgtgccacagcacttcagggccttctgaattaaagaagcagccaggcaaaatgtcagcttgtcttggcctagaagcccagaccctgtaattcagaagaaaagggaaggggtcagttctgctctcaactgtgtataaagggacaaaacccaccatgtgtatttcgacaatgctcatggaagaaattcagaattggtcactttaggttagggtaaattcaaaaaaaatgacagagtcagtaaaacattatgccaggggtcaaggatgactggagctctgcctgctgaactcttccctgtgcgagtctcactaatcttatcttcaggaagagttttcgatagaaaataccattaagggccaggcctggtggctcctgcctatgatcctatcactttgggaggccaaggtgggtggatcacctgaggccaggagtttgagaccagcctggccaacatggcgaaaccctgtctttaccaaaaatacaaaaatctgccctgtgtggtggtgcacacttataatcccagctactcaggaggctgaggcatgagaatcacttgaacctgggaggaggcggaggttgcagtgagccaagatcccaccactgcactccagcctctgtctcaaaaacaaaaacaaaaacaaaacaaaaagaaactattaacaatttttagttgtgagaagatataaacgtttccatcttaaccattttgcctgtgcagttcagtcatgtcaagtacattgacatcgtcatgcaaccctcaccaccaaccatctccagaacccttttcatcttgcacagctgaaaccctgtgctcattaaatagctccctattccatccctccccacagccactggcagccaccatcctactttttgtctctatgaatttgactgctctgagtacctcatctgactggaatcggagagtatttgtctttttgtgactggctcacgataaacacttttagatgactggttggaattaggagcaggtggcaccacaactgccatctcctttttctcctttttctcatctcctttttctctgttttccctgttccaccagtacaacagctgtgaacacatgggtctcatctttgcggtccctaacacggtggttctcaaccttgtttacatgttagaatcacctgggaaagttttcaaattactcttgcctggaccacattccagtctaattatatcagaatctcagggagtgagggctcacgaatgcatcgtttagaaaacaccctaggcatctcaaatttgcagcggaaattgctgtccacaccaagttgatgagctgaaatgtagactaacagtgggtaaatcaaagagtttaaagtagatggtctttaaggtctttttatattttaaaatgtgcaaagttggtagtatctttctaattctcaaccagcagtggttgagtggagtttcctatacccgaggggagctgggtggacagtctctggagtgtggctccccctgcagttcagttacatgttatgaccaccccactttagaaccctcttagccacccaagtaggcgctggacattgtcattccactgtcacgtgcattcaacaaatacttattaagatggctcacatttccttttaaaacacgcaagccgagagataattataattgtgctcattccatcaacttctaaagactgagatttctaaataattttaaggccaaatgaaggacattgcaggaatattgattccagcttcgtgcaagaaatagttttttgcaatgagagtggtttaatagaatgaggagccttgtgaaagtgattcccttggttctagtgctacacactcgtaaatggaatactgactgtaatggatgttgtaggataagattcccaaagtagaagaaactaggctgacttatgaggcccttctaactccaaaatgccataattttaaagcccgatagtagaagaacaatgcaagatgcaggaatggcttctgagctgagaaatgcagcagctccagaattctgtttagttcaactttcaaccacttcccaaggactgagttattaatggtaaaatagccaaaaatgaatacaagtgggtctcattatcaagaaaattcattatagcatttaagaatcgaacttctaaagaagattaattggggggttgattatttgcattgcaaaacaattcctgactttatgaaatcatttttggatactagagttcctgtgagcatcttagcatcgatttataggtcaccagtcacttagccaaggtgcttgggagagcaaactcttaactaaccaccgctctttagtgcttatttggaaataataaacatctgagatgtttattatttcctaattgtcattaggaaaacaatataatttcactacaggtatttagacactccatcagaaaacacaaaacatccaaaaattcaatgcagaaatagctagaatttcttgagtactataatatatcaaaaataccattgcatttagtcctcacataatccttgtaaagcaatatattattatctcagcttggtcaagtaatttattcgggggcactaaattacatacagcccaaatctttctgattctttcccttacaccaagttaccccaatcaacatctcttagaacaaaattgctcacagacagcttggagaccatgtgtgtttcggttaatttttgcccttaaaagattttcaatatgtgttgccagtgtttaaatgttagaattcctgtaaaagtctggatgtcctggctgtctcaaaaggtcagaaggtctggaagccgtgtccctgcagtcctgatggtgacaggctgggtgggtcccacctcagcaggggcctgagttctgcagattgtgctggttcccacccctctgtgttgcatcccccgaagggaagtgagtgtcatctgggatttatcccctcccatccagccctcattgcttacattgttatctacctggaacctgttggcactgcatttacaaccccaaataaaatctctcttccacttcccttgccctaattcagattccaaatgctctggttctgtatgtctcaaactcatttttgcattgttctcatttcccgagagtagttgggcttaaggaatactcatcttaaaattcttccgaacacaagtaattctatgccattgtttcctcacctgttggggagtttttgcctctgcacttaatagcccatcttgttttcatttctttccgctcctggggggctaggtttggtgttgctggtgatggtgggggaggaagaaatgccttcaagtcatctctgagatgaccaatgggctgtgaccagcaagctgggaccactgagctggtggaatggccttagtgagtaatagacagcagtgatgtgtcagcttttttctggcccaggaacagccaaacctcttatatttcagtggcctagttcccaatagaccttgaaggccctccaggtcttctttccacctaccccttgctccataccaccaccttccaccccataatattatagaatgacacctagtcagatgaaatgatacaacttaattttattaggacaaggctggtgggcactggagtggcaccttcagggccaggagaggcactggggaggggtcacaggatgctactcgggcacctagaagccacagctgccctccacagagcggcactgcaccatgcgcaggaatgtctcgaccttgtccatgtccttcctgaagcagtagagcagcccgtagttcttgagcagtgcgtcatggttgtgcgagtttgtgtcaaacttgctgtaggtctgcttgaggatctgcccagtccggcggctgccgtcttccagcctctgcaaagtgaaggaagagaaggagaggccaagcgcttgggcactgttccctccctctctcatttatccattttcctccctccccttcagggtgtagagaaaggcctggaggattcaccaggcgaaatgaagaataaggtgagttctcttgggtcagcgccttactgctaaaaagagggcagcagtatttctctcccccagccctcgaagccagtggggttccaggattggtgacccctggcgccaccctcacccccatcagcgtttggatgccttcctctaggtcctttaggaggtgatagtcatcgctgtccgaggtgtcatacaccaggttgttggcgaacatactcctgaggaaccgcacgggctccagccacgactcgatgagcagcagggagatgcggagcagctctagattctgcaggggaaggaccggcagtggctgtgctgcccgggagccctgaccacaggtctcccccatccccgcctaggggagacggcatccactcacggatttctgttgcgtttcctccatgttggagggtgtcggaatagagtctgagaagcagaaggaggtctgggagtcatgcaggaatgaatacttctggtcctttgggatataggtttcttcctaggagaaggaccccccaccaagaaggactgctggtttctatgctggagaccagctcccattgttgcttttctgggaacctggctcagcctatgctcatctgcctgcattttcgcttcagaaaacaaccctgagctccttagtctcctcccattacttccccagtgggggaaagtcaccccttcttgccacccctgacccgcacccattccccaagaacttacaaactcctggtaggtgtcaatggccagctggtgcgcgcgatgggcttggagcatagcgtggtcaaaaagcctggataagggaacggtttggacggcaccagcctcttgaagccagggcaggcagagcagggcaaaagccaggagcagggacgtccgggagcctggggagaaaccggagggcaatggagggagccggagaggaagaggccagcgctctccctgctccaggagctgtttgttttttttctctctctccatccctccagagaccaggaacattcagagattggccaaatatctggccttagatggcgatactcacattcataagccccaaacctgagggttagtgcccccgtcccatctacagggcgctgcctctcccctcaggacacgttgtgcccaaagggattttaggggcgcttacctggagccattgccactaggtgagctgtccacaggaccctgagtggttcggggagttgggccttgggatcctagagccggtctcttgtgggccctttttataccctggccagttctctctccctgcttgaccccacctgtttctgtgtacatttatgcatggggccactgacgggcttgtgctagtggataatttagaagctcctcccacacatgctgggatcatgccccctggcttgtcgtctttcccttctcaccatcaccagtgttgtaaggattgtgcacagagtgtcagccacagactccacccaacttgtcctctctttaagggtcaggtgggtgccctctggctgcaggccatgttggtcaacctgaacgcggggaaggctgtcaggatagccagtccttgagacccctaccgaccccattccactctctatcctattcctttcctcctccccgcgtgtttaacttccacccaccagacagaatgtgtgtgttgggaaaaggggccaagcacagccaatagattgtgggggttctgagcaccattgagtcctgaattccacttttgctgatgactcctgggcccacctgagtcagctggatgcagtgctaacactgaccactagagagaaccaaccccacacattgctctcccctttccctgaaccttggggcggaggcggtggggctcccccaggtccctggggatgaataacccagactcaaggtattgccccagctccttggacctgaagcagagatacaaaccaagaaacagaaatcccgggaacagacacggaccacaagcgcttcctcccatagtcctgaaaccaacagagaatctcaaagttggaagagctcttgaagatttgagtctcttccccagctttaaaactcagaacacatcacgccgaaagaggccctatccagccatggaagcccgtcctcttttgtctcttcctcctttccagacctgtgtagagcttatccagttgtcaaaggcctgcctgtgcattctcacgtctgacctgcaacttgtcttgtgtaggaggtatgagtatcatcccatttcacagatcaggagactgaggctcagagagactgattgcatgagctacctcagccagggcagcagatctccacaacctggctcttcccacattgcgtcatttaaagtcctttctccaggccgggcatggtggctcatgcctgtaatcccagcactttggaagactgaggtgggtggatcacttgaggtcaggagttcaaggccagactagccaacatggcaaaactccatctcttaaaaatacaaaagtagctgtgtgtggtggcagaagcctgcaatcccagttactccggagggtgaggaggtagaatcgcttgaacccaggactcagaggttgccgtgagccaagattgggccatggcactccagcctgggcgccagagtgagactccatttcaacaaccacaacaacgacaacaacaacaacaacaacaacaaaagtcctttctccagagcaggtggtgtggtgctactcagttatttagttattttagtttcctttctttctttccttctttctttctttctttctttctttctttctttctttctttctttctttctttctttctctctctctctctctctctctctctctctttctttctttctttctttctttctctctttgtctttctttctttcttgtttttgatggagtctcattctgtctctgaggctggagtgcagtggcatgatgttgcctcacagcaacctccacctcctgggttccagtgattctcccgcctcagcctccctagtagctgggattacaggcgcccgccactatgccgggctaagttttgtactttttaaatagagacggggtttcactatgttggccaggctggtctcgagctcttgactttaggtgatccaccctccctggcctcccaaagtactgagattactggcatgagccaccgctcccaacccagttatttcagcttctatatccctctgagtgcagggatcctgcccccaacacaaggggccctttgcctgattttgtctttccataaggggcagattgttctttctcaattctcaggtgagaatggcccagtggcatggggtgccttgtggaaacctcacagcaggaaaaggtgaaggcagagaaggccaggactgagcctcctgtctcctggtgcccagagttggggctatttcaatataatctggaggtcacaagcatcagatgcccccagagatggcagcaggaaagagcaccctctctagtggtgaaatcttccccccgagtttaagagcatctagcacttgactctgtagaaacacaagcaaacaaacaggcaaacgcttccagaagtggttggcagtggtgttggcaaccaacattgaacacccacacccctgtggcctaggatgtgaatgctggggccctgccatctccccactttcagagcagaaaacagagctcctttttctgccgtcattcctgaagcattactggactagcaccccagactcatcatctgctgggagggcactgtgctgtgagctgttctccaggcaggcctgtaggaggatccaagaggggtgtcatcgatgataccagctctgagaaatatggggtcaagggagggtggagtcaccactttcccctgctccttccagcaccagcaaagaggaggagccaggtgggaatggaagagggtccctgagctccaagtagaagagggtccctgcctcccccaccatccttcctccaatgtcagctgggacagggagcccccatgacagggtcttttagccagtgctggggacttagatgtggatttttggccatggaagaagtctgcagcctcccttaggaaagagggtggcaggggccctagttggggaccactacataactccgcaggtgggcacacgggtggcgaggctccccatgcaggttactgccaggaacatgtgggacctgccagggcaggggagtgtctcctctcacctctccatttctgttgaccgcagaattatggtgactcagaggactctaggaacccctggggaaacacctttgtaaggggttaccatgccaaccatggaccagagggaagaactgaggcccacaggtgtgggtagaagtcaatgatcattttctctagtctagatcttcccagagccttgagcaatggagaccatgtctatcattcattgctggtaaaaaatcaactttgaattagacttgggattcccctgacagtactgggaagtcgctcactgttggggcatcacttgaggccagatccctggctgctgcaggctgagagactacccaacaagagcctctatgtggccagtggggagaggctgcgctttgcacctctggcgtcagcttcaaaaggctcaggataggccggcgtggtggctcatgcctgtaatcccaacactttgggaggctgagacatgtggatcacctgaagtcaggagtttgagaccagcgtggccaacatggtgaaactgatctctactaaaaatagaaaaattagcgggggtggtggcatttgccgataatcctagttactggagcggctgaggcacgagaattgcttgaacccgggaggcagaggttgtcatgagccgagatcacactactgcactccagccagggcgaagaagtgagactgactttgtctcaaaaacaagcaaacaaacaaagaaagaaacaaacaaaacaacgaaaaaaccaaaaagaaaagtagaaaaatcctcatctctgagttcactgttacctagctccttacccaccgagaaacaaacatgggaagcaggggccccagggccaccatggacagagcagcattatattttagtccaaatccataagaacaccctaggtttcatctgggactccctgcccatacggaaagtgggaaagaagagttggctcaaagcagggagctgctagtgctcccttgggaaggaaagctgttgggtgaaggggacagcatttgggtgaggggaggagagggagcagggggtgaaggtagggagggagtgtggtgcactgaactcagctctttgggaaactgtttttgcagacaagccatggttagaggaatccagttgctctgccaaacagacctggctggaagggatggaacacacgctcgcctgcgtcccaaagggaaacccagctccagccttggtgtgtacctggaatggggtggtctttgaccttgaagtgccacagaaggcaacctagaaccacactggaacctactgctgcacagccactaaccagctgggctctgtcagcaaagacattgctgtcattgttcaaggtaacctttgctgccctgctgccaggcccaggatggaaacccctcaggggtttgggattcttatccaagcatgaaaataagaaagattctactaggttgggaagaatgagactcagaagtgggcctggtgggctggggtgggtgatctttgtactctcagactttcctaactctatcttctgtgcttgggcaggactggatgaaggaatcagctctaccctctttgtcattattaccgttgcccttggagtgggtgtcatcaccatagcactgtatttgagctatcggccctgcaaagtagacaggaagaaattgctctacaggcagaaagaggaggacaaagaggaggaaagccagtttgctgttcaggaagagaaaagtgcaactcatataattgacagctatttgattgaatgagagttctgctactgtggtttcccagggatgggagaagggatagaggagaaaggaagaaacacaatggcaggctgcattcctatttgtgtacatctgtcctgtaaaacggtgtttcaggcccccatgccccatgtcctgtgtgtccaatatgtccacaatctcaccattctctctctctctctttttttttttgagatggagtctcactgttgtcgcctaggctggagtgcaatgatgcgatctcggctcactgcaacttcagcctcctgggttcaggtgattctcctgcctcagcctccccagtagctgagattacaggtgcataccaccatgcctgtctaatttttgtatttttcgtagagatggggtttcaccatgttggctaggctgttctcaaactcctgacctcaagtgatccgcccaccttggccccccaaaatgctgggattacaggtgtgagccactgcacccagccacctttctctttagagctcaccctagtcattaggaatctcagtctcaatgtttgatttgtaagaaggcctcttgctccttgccaggtgcttcatcagtccactcttagatccaaaaaaaaaaagaaaagatcttgccgtttcttcatggttctcactgcccttttctcttaaacatcatactacagtcaggcatatcttagaaatacaactcatatttcatgggtttttgattactaactgggagctaaatttgtagtccatggacaggactttgaagggagtaagtatcaaatatggggccaggaatcagagctctgttcccatctccactttcccttgctcccctgacctgggcttctggagtgccagctcccagagctgagcttgttgacatcattaaggatcagtggcaagctgcaactcagtaaccatctgttgtgggtcttgggggagtatacagatggtaagaaattccacttcgggccagacaagcatcgtatctagcccagtgttctgtctctgaagtagaaggtagagttcttccatgaaattggcctcttaggttaagagctccaaacatctctgaattccttttcatagagtgatcaactgtgagttcgcatttgccagttttcttttttttacccatataggtgtctaggttagagttgcaatgtttactctctgttttcatcaagaagtgcatatttttttctgactgtaaacaatttccttgaagcttcaagaggaatcctcttgtgaaaatgttcatatgattttatggttcagcctccttccctgtccttcggaaagagtatattcaccctcggagaaggcgtgaggaatcacaaaaccagatcttttctcccaagtcagtcaagaaatgttcactggaatgttgctatggtaaaaataaaagtggttttatgatgtccaaatgcagttcccttcccttctgtgtcattgctgaaagctcttgttatgtcaaatggttgcattttatcactttttttttttttcagatgcagtctcgctctattgcccaggctggagtgcaatggcgtgattttggctcacttccacctctacctcctgggttcaaggatttctctgcctcagcctcccaagtagctgggattacaggtgcccatcaccatgcccagctaattttttgtatttttagtagagacagggtttcaccatcttggccaggctggtcttgaagtcctgatctcgtgatccacccacttcggccttctaaagtgctgggattacaggtatgagccaccgctcccggctgcattttataactttaagtacaatttctaaggaaaaaataccgtgttgatagcataaacaaccagcccggggcagggggtgcattagctcagggtggcagcctatgtaaactgctttcaaaactgaaattcaggccggggcggtggctcagcgtgtaatcccagcactttgggaggctgaggcgggcgaatcacttgagccccagagtttgcgaatagcctgggcaacatggcaaaccccatttctacaaaaaacacaaaacttagccaggtatagtggcacgtgcctgtagtcccagctacttgagagtctgaggtgggaggatcacttgggcgcgggaggtggagggttgcagcgagttgagatcatgcactgcactccagcctgggtgacatagccagaccctgtctcaaaagcaaaacaaaggaaacacaagcaaaaagaaaagctaaagttcagacttccagatagagagaggtccatagctttccaaattgcagataccagctagaaaaaaccatggcatcagacagcagagggaaaacgttttcccattcttcccagacctcccctgagtctggtgctatagattaagtgtaaaagtaaccctttggtttcaccacatacaaggcagtggggatacagtggtgaacaaaacattgttcctggcttccacaaatttattaggaaagcaagacaaacaagtaggagattacatttgtgcatgaactcctatgactgggaaaacagattgttaagagaaagcataactcgaatcaaggaaggcttcctggagggacacgaaatatcttgactttataaaatagcatcatccccgaacatgaccttttcaacctcaatgtttccactaggtggagctactgctccttcatcatgtgagtctaatataaatcatccaccttccctgaattgagcatttggggaagtaagttaagaagcaggtttaagagacaggagtatacagccacaccatgcagggatccacagccattttggtgtcaggatcagtcgcatcagggctgtagatatcctgtatctgcaaaccctgcctcatggcctcagtgccttgaagcacagcgaatccaacaaggaaggggaaaatgagccaggcatggtggtgtgcacctgtaatcccagctactggggaggctgaggcaggagaatcgcttgactgtgggaggcagaagttgcagtgatccgagatcgtgccattgcattccagcctgggcaacaaagcgagaccccatcttgaacaaaacaaaaacaaaagcaaacaaaaccaaaaagggaggaagaagggggccacttggactttctagttccagcagggcgagcctggaggctcagccggctgctgcctttgcttctcactgctacagggtgtcagtgttgacagatggtcccacacagtaccctcaaaccaagcgggtctgcagatctgggttcccacctgctgtagatctctgagggaggatgatctgcttcttcggggcctggtccagctctgcaggtgtcctcttgctggggtttccagctttccagttcttagagctcagtagtttggatgagccgtcccgcaaagctcttcagagtaggctgggctttttcccttgtagacttggaacctctgttcactttccttcccgaaggatccacacaaccagagatcaggcaggcctttctcattgattctttttttttttttggagacggagtctcgctctgtctcccaggctggaatgcagtggcacgacctcggctcactgcaacttctgcctcctggcttcaagcaattttcctacctcagcctctggagtagctgggattacaggtgtgcaccaccacacctggctaatttttgtgttattagtagaaacaggatttcgtcatgttggccaggctggtctcaaactcctgacctcaggtgatctgcccacctcggcctcccaaagtgctgggattacaggagtgagtcaccacgcccggcttcattgattcttaaagcaagaaggatctcatatctcttttccagtataatagagcttctaagggtagttgccttcattgtctataggaggaggccccaccctctaaatggttttgatcatattctttctgaacattaaagcaaccagctcatacttaaattgcagctaccttgattatctccagaggaagagtggcctttaatactccaaaattttatcttctttcttattatttttgagagagaatcttcctcagccacccagctggagtgcagtggcttgatgggcccagcccaacactgcctcccgggctcaagcgattctcatgccttcgtagctgggaatacaggtgtgcaccaccacacctggctaatttttgtattttttagtaagagacggggtgccaccatgttggccaggcttatctcgaacttgtgacctcctcccgcctcagccctccaaagtgctgagattactggcgtgagccacagtgcctggccatttatgctctcaaggatggtcagggtgacattctggtgtctttctctctagacctgagaaagcataagttacatcgttagtgggacttcttaccataggattaataatagtatttaccttagagaattatagttagaaagaaatgacataatacttgtaataaactagcatggtgctggagacatgtgttcacatttgttggtttttattattacactgataattctagtggtaattaagcacatcattataatcacagtaaactcaaagcaagaatcagaaatccatgataaccatgagggccatcaaaggtcatatacactgtgcacagctttccggtttttctagtctttttcttgctccttcccctactttccccccagtttggtgccctaagatttaggactactaatagggtgaccagtcctgtgagctgagtttgcattgagctgagggattcctggaaggaacgtgggactttcagtgttgacattgagaaagtctcctgcaaaccaggacgagttggtgaccctaatcccagaggtactcattgtgtgcctcagcactccagggccttctgaattaaagaagcatccaggcaaagtgtcagcttgtcttggctgagaagcccagaccctacaattcagaagaaaaaggaaggggtcagttctgctctcaactgtgtataaagggacaaaaccaaccatgtgtatttcaacaatgctcatggaagatattcagaagtggtcattttaggttagggtaaattcaaaaaaatgacagagtcagtaaaacattatgccaggggtcaaggatgactggagctctgcctgctgaactcttccctgtgcgagtctcgataatcttatcttcaggaagagttttcattagaaaataccattaagggccaggcctggtggctcccgcctgtaatcctatcactttgggaggccaaggagggtggatcacctgaggccaggagtttgagaccagcctggccaacatggcgaaaccctgtctttaccaaaaatacaaaaatctgccctgtgtggtggtgcacacttataatcccagctactcaggaggctgaggcatgagaatcacttgaacccgggaggaggcggaggttgcagtgagccaagatcccaccactgcactccagcctctgtctcaaaaacaaaaacaaaaacaaaagaaactattaacaatttttagttgtgagaagatataaacatttccatcttaaccattttacgtgtacagttcggtcacgtcaagtacattgacatcgtcatgcaaccctcaccaccaaccatctccagaacccttttcatcttgcacagctgaaaccctgtgctcgttaaatggctccctattccatccctccccacagccactggcagccaccatcctactttttgtctctacgaatttgactgctctgagtacctcatctaactggaatcagagagtatttgtctttctgtgactggctcacgataaacactttttagatgactggttggaattaggagcaggtggcaccacaactggcccaggcctctcgtctcctttttctccgttttccctgttccaccaatacaacagctgtgaacacatgggtctcatctttgcggtccctaacacagtggttctcaaccttgtttacatgatagaatcacctgggaaagttttcaaactactcttgcctggaccacattccaggctaattatatcagaatctcagggagtgagggctcacgaatgcatcgtttagaaaacaccctaggcatctcaaatttgcagcggaaattgccgtccacaccaagttgatgagctgaaaggtagactaacagtaggtaaatcaaagagtttaaagcagatggtctttaaggtctttttatattctaaaatgtgcaaagtcaggtagtatctttctaattctcaaccagcagtggttgagtggattctcctatacccgaggggagctgggtggacagtctctggcgtgtggctccccctgcagttcagttatatgttatgaccaccccactttagaaccctcttagccacccaagtaggcgctggacattgtcattccactgtcacgtgcattcaacaaatacttattaagatggctcacatttccttttaaaacacgcaagccgagagataattataattgtgctcattccatcgacttctaaagactgagatttctaaataattttaaggccaaatgaaggacattgcaggaatattgattccagctttgtgcaagaaatagttttctgcaatgagagtggtttattagaatgaagagccttgtgaaagggattcccttggttctagtgctacacacttgtaattggaatactgactgtaatggacgctgtaggataagattcccaaagtagaagaaactagactgacttatgaggcccttctaactccaaaatgccgtaattttaaattccaatagtagaagaacaacgtaagatgcaggaatgtcttctgagctgagaaatgcagcagctctagagttctgattagttcagctttgaaccacttcccaaggactgagttattaactgcaaaatagccaaaaatgaacacaagtgggtctcgttatcaaaaaaattcattatggcacataagaatcagaacttctaaagaagattaattagggggttgattatttgcattgtaaaataattcctgacttcatgaaatcatttttggatactagagttcctgtgagcatcttagtatagatttaggtcaccagtcacttagccaaggtgcttgggagagtaaactcttaactaaccaccgctctttagtgcttatttggaaataataaacatctcagatgtttattattattataaaacatccaaaaattcaatgcagaaataactacaatttcttcagtactataatatgtcaaaaataccattgcatttaatcctcacataatccttgtaaagcaatatattattatctcagcttggtcaagtaatttattcagcgacactaaattgcatacagcccaaatctttctgattctttcccttacaccaaattaccccaatcaacatctcttagaacaaaattgctcacagacagcttggagaccatgtgtgtttgggttaatttttgcccttaaaagattttcagtatgtgttgccattatttaaatattagatttcccgtaacagtctggatgtcctggctgtctcaaagaatcagaaggtctggaagccgtgtccctgcagtcctgatggtgacaggcgggctgggtcccacctcagcaggggcttgagttctgcagattgtgctggttcccacccttctgtgttgcatcccctgaagggaagcgagtgtcatctgggatttatcccctgccatccagccctcattgcttacgttgttatctacctggcacctgttggcactgcatttacaacccgcaaataaaatctctcttccacttcccttgccctaattcagattccaaatgctctggttccatatgtctcaaactcatttttgcattgttctcatttcccgagagtagttgggcttaaggaatattcatcttaaaattcttccgaacacaagtaattctatgccattgtttcctcacctgttggggagtttttgcctctgcacttaatagcccatcttgttttcatttcttcccgctcctggggggctaggtttggtgttgctggtgatggtgggggaggaagaaatgccttcaagtcatctctgggatgaccaatgagctatgaccagcaagctgggaccactgagctggtggaatggccttagtgagtaatagacagcagtgatatgtcagcctttttctggcccaggaacagccaaacctcttatatttcagtggcctagttcccaatagaccctgaaggccctccaggtcgtcttcccacctaccccttgctccataccaccaccttccaccccataatattatagaaggacacctagtcagatgaaacaatacaacttaattttattaagacaaggctggtgggcactggagtggcaccttcagggccaggagaggcactggggaggggtcacaggatgccacgcgggcccctagaagccacagctgccctccacagagcggcactgcaccatgcgcaggaatgtctcgaccttgtccatgtccttcctgaagcagtggagcagcccgtagttcttgagcagtgcgtcatggttgtgcgagtttgtgtcaaacttgctgtaggtctgcttgagggtctgcccagtcaggtggctgccgtcttccagcctctgcaaagtgaagcaagagaaggagagaccaagcgcttgggcactgttccctccctctctcatttatccattttcctccttccccttcagggtgtagagaaaggcctggaggattcacgaggggaaatgaagaataaggtgagttctcttgggtcagcgcctgactgctgaaaagagggcagcagtgtttctctcccccagccctcgaagccagtgggcttccaggattggggacccctggtgccaccctcacccccatcagcatttggatgccttcctctaggtcctttaggaggtgatagtcatcgctgtccgaggtgtcatacaccaggttgttggtgaaggtactcctgaggaaccgcacgggctccagccgcgactcgatgagcagcagggagatgtggagcagctctaagttctgcaggggaaggaccggcagtggctgtgctgcccgggggctctgaccacaggtctcccccatccccgcctaggggagacagcatccactcacggatttctgctgcgtttcctccatgttggaggatgtcggaatagagtctgagaagcagaaggaggtctgggagtcatgcaggaatgaatacttctgttcctttgtgatataggcttcttcctaggggaaggaccccccaccaagaaggaccactgctttctatgctggagaccagctcccactgttactcttctgggaacctggctcagcctatgctcatctgcctgcattttcgcttcagaaaacaaccctgagctccttagtctcctcccattacttccccagtgggggaaagtcaccccttcttgccacccctgacccgcacccattccccaagagcttataaactcctggtaggtgtcaatggccagctggtgtgcgcgatgggcttggagcatagcctctttaaaaagcctggataagggaacggtttggacggcaccagcctcttgaagccagggcaggcagagcagggcaaaagccaggagcagggacgtccgggagcctggggagaaaccggagggcaagaagggagccgcagagcaagaggccagcactctccctgttccaggagctgttttctttttctctctctccatccctccagggaccaggaacattcagagattggccaaatatctggccttagatggcgatattcacattcagaagccccaaacctgaggttagtgcccccgtcccatctgcagggcgccgcctctcccctcaggacacgttgtgcccaaagggattttaggggcgcttacctgcagccattgccgctaggtgagctgtccacaggaccctgagtggtgcggggagtcgggccttgggatgctggagctggtctcttgtgggccctttttataccctggccccttctctctcgctgttgcccccacctgtttctgtgcacatttatgcatggggccactgacgggcttgtgctaatggataatttggaagctcctcccacacatgctggcatcatgtcccctggcttgtcatctttcccttcccaccgtcaccagcgttgtgagggttgtgcacagagtgtcaaccacagacaccacccaacttgtcctctctttaaggttcaggtgggtgccctctggcagcaggccatggtggccaacctgaatgcggagaaggatgtcaggatagccagtccttgagacccctatcgaccacatcccactctctatcctattcctttcctcctccccgcatgtttaacctccacccaccagacagaatgtgtgtgttgggaaaaggggccaagcacagccaatagattgtgggggttgtgagcatgattcagtcctgaattccacttctgctgacgactcctgggcccacctgagtcagctggatgcagtgctaacactgaccactagagggaaccaaccccacactttgatctcccctttccctgagccttggggcggggcggagggagggggttgggtggggggctcccccaggtcactggggacgaagaactcagactctcaaggtattgccccagctccctggacctgcagcagagacacaaaccaagaaaccgaaatcccgggaacagacacggaccacaagcgcttcctcccatagccctgaaaccatcagagaatctcaaagttggaagagctcttgaagatttgaatctcttccccagctttggaactcaaaacacatcacgccgaaagatgccctatccatccatggaagcccgtcctcttttttctcctcctcctttccacacctgtatagagcctatccagttgcgaagggcctgcctgtgcattctcacgtctgacctgccacttgtcttgtgtaggaggtatgattatcatcccatttcacatatcaggagactgaggctcagagagactgattgcatgagctacctcagccagggcagcagatctccacagccttgctcttcccactttgtgtcatttaaagtcctttctccaggccgggcacggtggctcatgcctgtaatcccagcactttgggaggctgaggtgggtggatcacttgaggtcaggagttcaaggccagactagccaacatggcaaaacaccaactctctagaaatacaaaagtagctgtgtgtggtggcgcaagcctgtaatcccagttactccggagggtgaggtggtagaatcacttgaatccaggaggcagaggttgctgtgagccaagatcgcgccactgcactccagcctgggcgacagagtgtgactccatttcaacaaccacaacaacaagaaaaaagtcctttctccagaacaggtagtgtggtgttactcagttatttagttattttagtttctttctttctttctttctttctttctttctttctttctttctttctttctttctttctttctttctttctttctctttctttctttttctttttctttccttcctcctttccttttctttctttctttctttctctttctttctttctttctttccttcctctttgtctctctctctctctttctttcttttttttcagttggagtctcattctgtcacccaggctggagtgcagtggcatgatgttgcctcacagcaacctccacctcctgggttcaagtgattctcctgcctcaccctgtttagtagctgggattacagtcgcccgccaccacgccaggctaaattttgtacttttttagtagagacggggtttcactatgttggccaggctggtctcgaactcttgactttaggggatccaccctccctggcctctctaagtacttagattactggcgtgagtcaccgcccccaacccagttatttcagcttctaaatccctctgagtgcagggatcctgcccccaacacaggggccctttgcctcattttgtctttccataaggggcagattgttctttctcaattcccaggtgagaatggcccagtggcatggggtgccttgtggaaacctcacagcaggacaaggctgaggcggagaaggccaggactgagcctcctgtctcctggtgcccagggttggggctatttccataccatctggaagtcacaagcatcagatgcccccagggataagagcaggaaagaccaccctctccagtggtgaaatcttcccccaccctgagtttaagagcatgtagcacttgacactgtagaaacacaagcaagcaaacaagcaaatgcttctagaagtgattggctgtggtgttggcaaccaacattgaacacccacacccctgtggcctaggatgtgaatgctggggccctgccatctccctactttcagaggggaagacagagctcctttttctgccgtcactcctgaagcattaccggaccagcaccccagactcatcacctgctgggagggcactgtgctgtgagctgttctccaggcaggcctgtgtgaggatccaagaggggtgtcatcgatgataccagctccgaaaaatatggggccaagggagggtggagtcaccactttcccctgctccttccagcaccagcaaagaggaggagccaggtgcgaatggaagagggtccctgagctccaagtagaagaaggtccctgcctcccccaccatccttcctccaatgtcagctgggacagggagcccccatgacagggccttttagccagtgctggggacttagatgtggattttcggccatggaagaagtctccagcctcctttaggaatgagggtggcaggggccctagttggggaccactgcataactccgcaggtgggcacaggggtggcgaggctccccagacaggttactgccaggaacacgtgggaccagccagggcaggggagtgtctcctctcacctctccacttctgttgaccccagaattatggtgactcagaggactctagggacccctggggaaacacctttataaggggttaccatggcagccatggaccagagggaagaactgaggccctcaggtgtgggtagaagtcgatgatcgttttctctagtctagatcttcccagagccttgagcaatggagaccatgtctatcattcattgctggtaaaaaatcaactttgcattagacttgggattctcctaacagtactgggaagttgcccactgttggggcatcacttgggtccagatccttggctcctgcaggctgagagactactcagggagagcctccacatggccagtggggagaggctgggcttcgcgcctctggcgtcagcttcaaaaggctcagaataggccgggcgcagtggctcatgcctgtaatcccaccactttgggaggccagggtgggtggatcatgaggtcaggagttcaagaccaacctggtcaagatggtgaaatcccgtctctactagaaatagaaaaattagctgcgcatggtggtaggtgcctgtaatcccagctactcaggtggctgtggcagggaattgcttgaacccgggaggtggaggttgtagcgagctgagatcatgccactgcactcctgcctgggcaacagagcgagactctgtatcaagaaaaacaaaaaaaaactctacgtaatctcacaatcatcttggttcttttaaagaacctgcctttataatttaggatccatgaatttctctgtgtgtttggaagcccttcctatgtccaacctcgactaactctagggttctgtgtgcctgctgtggaaagtcacagatctgctgttgatcctaaagtggtgtctttcaggcttcaagatctcctgttaggttcaagactgtggggttgaggacgatcacatttttcgaagccattctcaccggtcttagggatcgcctccaagggactggtgggtgctccttccactctcactttggtgatttgaggcgcacacttctcacctgcagctctgttctttcttccttgagatcagaggctggttattgtactgggacatactctacctccttttggcttctaatgtcctttccatgagtttgctaccgagtcaattacttggctcattggattgaggtcttcagagaatattatatggggattcccaagggctctcctaggggaggtgaggaagatgatcaatacttctgcgtgtccaccatgtgcttggcactctactgaccatagggatgtgagtgaggatactgaggctcaaagagatgaggtggcttgcctggagctctcccagtttctaagtgatggcttccaaggcccccgggctttccttccatgccaagctctttagaagtctcatctagtaaaggtggtggcactactaggcatggacagaacttgcctcagtgcaaagctagcaggacaggggtgaggtccctacacaggatgttcaatgaagatggggggaattgaacacaaggaacttcagccacagaatgaggtgtccataggcattaaggaaagtggtagaaaagaagcacccagcgtagctcgggttagtgaaccgaggcacttcatgctgcatatttgtattgcacgtttcagtgtacatcgtgtttcacttcctatatctcgttggacacttcagtttgccatatgatatgtccagggggttcaggcacggaggaagggcctcggaagacctcggggggagaggggcaggcactgctgtgtattgatggggggattgtttgcactggttgatgatctctgaacaaccaagaagtacacaaggatctacctaactggacgtgctaagtaatttcactttggggattattctccagggagacgatccattgatagagaagtgaaaagcatcgagatgtgtctagtagttgtaggaagtctggggtgctttcctgatggggtgccctcagctggaaatagcccctccttcctttgacctgtcctgtggctatttgcagacattttattcctcttaccagactgtaagctctttgaggctggatttctgccttttgtctattcattcattcactcattcttctattcatgcattcaccaattccacaagtagttgttgcctgtaacatgtgccagagattgtaccaggcagatgggcatatctagataagcaaaagacatgatcctttctcttctggagctaacaatctactgggggcagagataatagcaaacaagtaaatatataatggttaaatagaaatttcgaatttggaacattctcatgaggaaaacagctaagatatggagggagagaagaagccagaaggtgacgggacgaggcagctggcacagccctaggcccaggaattcaacaggcatctactgagtggacccaacgcatgagaggacagtgccaagcaagcaactcaaatgtcccaccggttgggcatggccaggtagcctatgctgtgtctggacgtcctcctgctggtatagttattttaaaatcagaaggacagggaagggagcagtggttcacgcctgtaatcccagcaatttgggaggccaaggtgggtagatcacctgagattaggagttggagaccagcctggccaatatggtgaaaccccgtctctaccaaaaaaacaaaaattagctgagcctggtcatgcatgcctggaatcccaacaactcgggaggctgaggcaggagaatcgcttgaacccaggaggcggagattgcagtgagccaagattgtgccactgcactccagcttggttcccaatagaccccgcaggccctacaggttgtcttcccaacttgccccttgctccataccacccccctccaccccataatattatagaaggacacctagtcagacaaaatgatgcaacttaattttattaggacaaggctggtgggcactggagtggcaacttccagggccaggagaggcactggggaggggtcacagggatgccacccgggcagctagaagccacagctgccctccacagagcggcactgcacgatgcgcaggaatgtctcgaccttgtccatgtccttcctgaagcagtagagcagcccgtagttcttgagtagtgcgtcatcgttgtgtgagtttgtgtcgaacttgctgtaggtctgcttgaagatctgcccagtccgggggctgccatcttccagcctctgcaaagtgaaggaagagaaggagaggccaagcgcttgggtactgttccctccctttctcattcattcattttcctccctccccttcagggtgtagagaaaggcctggaggattcacgaggggaaatgaagaataaggtgagttctcttgggtcagggcctgactgctaaaaagagggcagcagtgtttctctaacacagctctcaaagtcagtggggctccaggattggggacccctggcgccaccctcacccccatcagcgtttggatgccttcctctaggtcctttaggaggtcatagacgttgctgtcagaggcgccgtacaccaggctgttggcgaagacactcctgaggaactgcacgggctccagccacgactggatgagcagcagggagatgcggagcagctctaggttctgcaggggaaggacgggcattggctgtgctgcccgggggctctgactacaggtctcccccatccccgcctggggagaaggcatccactcacggatttctgttgtgtttcctccctgttggagggtgtcggaatagactctgagaaacagagggaggtctgggggttctgcaggaatgaatacttctgttcctttgggatataggcttcttcctaggagaaggaccgcccaccaaggtctacgctggagaccagctcccattgttacttttctgggaacctcactcagcgtgtgctcatctgcctgcattttcgcttcgggaaaaaccctgagctccttagtctcctcctcttatttcccagcgggggaaagtcaccccttcctgccacccctgatgcgcacccattccccaagagcttacaaactcctggtaggtgtcaaaggccagctggtgcagacgatgggcgcggagcatagcgttgtcaaaaagcctggataagggaatggttgggaaggcactgccctcttgaagccagggcaggcagagcaggccaaaagccaggagcagggacgtccgggagcctggggagaaaccagagggcaacagagggagccggagagcaagaggccagcactctccctgctccaggagctgtttgtttttctctctccatccctccagggaccaggagctttctgagattggccaaatactgggcttacatggcgatactcacattcagaagccccaaacctgagggttagtgcccccgtcccatctacaggtcgctgcctctcccctcaggacacattgtgcccaaagggattttaggggcgcttacctgtagccattgcagctaggtgagctgtccacaggaccctgagtggttcggggagttgggccttgggatccttgagctggtctcttgtgggccctttttataccctggccccttctctcccactgttgaccccacctgtttctgtgtacatttatgcatggggccactgacgggcttgtgctaatggataatttagaagctcctcccacacatgctgggatcatgccccctggcttgtcatctttcccttcccaccgtcaccagtgttgtgagggttgtgcacagagtgtcagccagagataccacccaacttgtcctctctttaagggtcacgtgggtgccctctggccgcaggccatggtggccaacctgcacgcggcgaaggatgtcaggatagccagtccttgagaccccctaccgaccacatcccattctctatcctatccctttcctcctccccgcatgtttaacctccacccaccagacagaatgtgtgtgttgggaaaaggggccaagcacagccaatagattgtgggggttgtgagcacgattcagtcctgaattccacttctgctgaggactcctgggtcagcctgagtcagctggatgcagttccaacactgaccactagagagaaccaaccccacactttgctctcccctttccctgagcattgctggggctcccccaggtccctggggacgaagaacccagactcaaggtattgccccagctccttggacttgcagcagagacacaaaccaagaaacagaaatcccgggagcagacacggaccacaagctcttcctcccatagccctgaaaccatcagagaatctcaaagttagaagagctcttgaagatttgagtctcttcctcagctttggaactcagaacacatcacgccgaaagatgctctatcaggctgggcgcggtggctcatgcctgtaatcccagcactttgggaggccgaggcgggcggatcacgaggtcagtagatcaagaccatcttggctaaccaggtgaaatccactctgtactaaaaatgcaaaaaagttagctgggcgtagtggcgggcgcctgtattcccagctactcgggaggctgaggcaggagaatggcgtgaatccgggaggcagagcttgcagtgagcggagatcgtgctgctgcactccaaccttggcaacagagcaagactccacctcaaaaaaaaaaaaaaaaaaaaaaagaaaaagaaaaagaaagatgccctgtccagccatggaagcccctcctcttttttctcctcctccttttcagatctgtatagagcttttccagttgccgagggcctgcctgtgcattctcacatctgacctgccacttgtcttgtgaaggaggtattattttcttccgatttcacagatcaagagactgtggctcagagagactgattgcatgagctacctcagccagggcagcagatctccacaaccttgctcttcctacattgcgtcatttaaagtcctttctccaggccggacacagtggctcacgcttgtaatccccaaactttgggtggctttgaggtgggtggatcacttgaggtcaggagttcaaggccagactagccaacatggcaaaactccatctctactaaaagtacaaaaattagctgggcgtggtggcatgagcctgtaatcccaactactcgggaggctgaggcgggagaatcacttgaacccaggaggcagaggttgccgtgagccaagattgcgccactgcactccagcctgtgcagcagagcagaactccatctcaaaaaacaaaaaataataatattaaatttttttttctccagagcaggtagtgtgatgctactgagttatttagttattttagcttcttccatgttcctccaatctcaactggggcagggagcccccatgacagggcctttttgctagtgccggggacttagatgtggattttcggccatggaagaagtctccagcctcccttaggaatgagggtggcaggggccctagttggggaccactgcataactctgcaggtggacacaggggtggcgaggctccccagacaggttactgccatgaacacgtgggaccagccagggcaggggagtgtctcctcttacctctccatttctgttgacccagaattatggtgactcagaggactctagggacccctggggaaacacctttacaaggggttactgtggtaaccatggaccagagggaagaactgaggcccacaggtgtgggtagaagtcggtgatcgttttctctagtctagatcttcccagagccttgagcaatggagaccatgtctatcattcattgctagtaaaaaatcaactttgaattagacttgggattctcctaacagtactgggaagtcgcccactgttggggcatcacttgaggccagatccctggttgctgcaggctggagcctctccccacatggccagtggggagaggctgggcttctcacctctggtgtcagcctcaaaaggctcaggaaaagttgggcacacgcctgtaatcccaccacttagggaggccaaggtgggtggatcatgagatcaggagttcaagaccagcctggccaagatggtgaaatcccgtctctgctaaaaatacaaaaattagccaggtgtggtggcaggcgcctgtaatcccagctattcaggaggccgaggcagggaattgcttgaacccgcgaggtggaggttgcagttagccaagatcacgccactgcactccagcctgggcgacagagcgagactctgcatccaaaaaaaaaaaaaaaaaaaagctcaggataaatctcagaatcatcttggttcttttaaagaacctccctttataatttaggatccatgaatttctctgtgtgtttggaagcccttcctatgtccaacctcgactaactctagggttctgtgtgcctgctgtggaaagtcacagatctgctgttgatcctaaagtggtgtctttcaggcttcaagatctcctgttaggttcaagactgtggggttgaggacgatcacatttttcgaagccattctcaccggtcttagggatcgcctccaagggactggtgggtgctccttccactctcactttggtgatttgaggcgcacacttctcacctgcagctctgttctttcttccttgagatcagaggctggttattgtactgggacatactctacctccttttggcttctaatgtcctttccatgagtttgctaccgagtcaattacttggctcattggattgaggtcttcagagaatattatatggggattcccaagggctctcctaggggaggtgaggaagatgatcaatacttctgcgtgtccactatgtgcttggcactctactgaccatggggatgtgagtgaggatactgaggcccaaagagataaggtggcttgcctggagctctcccagttcctaagtgatggcttctaaggccccccaggctttccttccatgccaagctctttagaaacctcatctagtaaagatggtggcactactaggcatggacaaaacttgcctcagtgcaaagctagcaggacaggggtcaagtccctgcacagaggatgttcaatgaagatggggggaattgaacacaaggaacttcagccacagaatgaggtgtccataggcattaaggaaagtggtagaaaagaagcacccagcatagctcgggttagtgaaccgaggcacttcatgctgcatatttgtattgcacgtttcagtgtacatcgtgtttcacttcctgtatctcgttggacccttcagtttgccacatgatatgtccagggggttcaggcacggaggaagggcctcggaaggcttggggaggagaggggcagacactgctgtgtattgatggggggattgtttgcactggttgatgatctctgaacaaccaagaagtacacaaggatctacctaacttgacgtgctaagtaatttcacattggggattattctccagggagacgatccattgatagagaagtgaaaagcatcgagatgtgtctagtagttgtaggaagtctggggtgctttcctgatggggtgccctcagctggaaatagcctctccttcctttgacctgtcctgtggctatttgcagacattttattcctcttaccagactgtaagctctttgaggctggatttcttttttttttttttttgagaccgagtcttgctctgtcgcccaggctggagtgcagtggcgcgatcttggctcactgcaagctccgcccccctgggttcatgccattctcctgcctcaggctccctagtagctcggactacaggagcctaccgccatgcccggctaatgttttgtatttttagtagagacggggtttcactgtgttagccaggttggtctccatctcttgatcttgtgatccacccgcctcggcctcccaaagtgctgggattacaggtgtgagccacccacgcccggcctgaggctggatttctgcctttcgtctattcattcattcactcattcttctattcatgcattcaccgattctacaagtagttgttgcctataacatgggccagagactgtaccaggccgatggacatatctagataaaccaaagacatgatcctttctcttctggagctaacaatctactgggggggcagagaaaacattttaccattacgtaatgtatatatataaaatggtaaaaaaaattacataatgtgtatatatatataaaattgtaatatatatatacatatattattttttttgatggagttttgctcttgttacccaggctggagtgcaatggcacaatctcagctcactgaaacctccacttcctgggtttaagcgattctcctgcctcagcctcccgagtagctgggattacaggcatgtgccaccatgcccgattaattttgtatttttagtagagatggggtttcaccatggtcatcaggctggcctcgaactcctgacctcaggtgatccacccgccttggcctaccaaaatgctgggattacaggcatgagccaccgcgcccggccaggtatatatatatatgttggtaatataatggtataatagaaatttctaattggggacattcccatgaagaaattgctaagatatggagggagagaataagccaggaggtgaagggacgaggcagctgccacagccccaggcccaggaattcaataagcatctactgagtggacccaacgcatgagaggacagtgccaagcaaagaactcaaatgtccaaccagctgggcatggccaggtagcccatgctgtgtctggacgtcctcctgctggtataattattttaaaatgacaaggacagggaagggcgcagtggcttacatctgtgatcccagcaatttgggaggccgaggcgggcggatcacctgaggtcaggagttggagaccagcctggccaatatggtgaaaccccgtctctactaaaaatacaaaaattagcggagcctggtagtgggcgcttgtaatcccagctacttgagaggctgaggcaggagaatcgcttgaacccaggaggtggagggtgcagtgagccaagatcgtgccattgcactctagcctgggcaacaagaacaaaactctgtctcaaaaaaaaaataataataaataaaataacaaggacaggaacttgattgtcaaatgcaaaaggtgacaaggcagagtgcccaagttcccaggaatgttctatacggactcattaacttacacgaagttctgccttcccctcctgccacatggggaaagtggtattaggtctggaggggggatgccttttttaaaaaattgaaaattatattaggatcagtctaagtgtgttttaacaaactacactctgatttaagtcaggagataatgctcattaatttttgtcctctgcagtcacctgtttccaagtaaagtcttttgggtgggagaggcaggtgtcccaagtggaagatttgtggttgtttgcagctgagtcaatggcaggaccagaagatgacatacaaggagcagcttgtagacctgagacacactcaggaatgtcacagatgtgggctctgaacccacttcttgaggtgatccaaagagagcagacagagatcccaaataccatgttccgagatggcttttgttgttgttattgttgagacagagtctcactctgtcgcctagtctggaatgcagtggcatgatctcggatctcagctcactgcaacctccccttcctaggttcaagtgattctcctgcttcagcctccccagtagctgggattacaggcatgtgccaccatgcctagctaatttcatttcatttgagacggagttttgctcttgttgcccaggctggagtgcaatggcgtgatctcagctcaccgcaacctccaccaggttcaaaagattctcttgcctcagcctcccaagtagctaggattacaggcatgcgccaccatgcttggctaattttgtacttttagtacagatggggtttctccatgttggtcaggctggtctggaactcccaacctcagatgatctgcccgcctcagcctcccaaagtgctgggattacaggtgtgagccaccgcactgggcctaaattttttatttttagtagagatggggtttcaccacgttggccaggctggtcttgaactcctgacatcatgtgatccacctgcctcagcctcccaaggtgctaggattacaggcatgaaccaccgcacccggccctgagatggctttagaggcccctcagagaaacctcagccagaccagacacctactaagggacccaaatagccaccgttttttgcgttttgttttgtttttctctcgtttccaattctgctggaaaaacacccaaaaccttgggtcagatcaccccaaccctagcagcacctgcagcaagaggggaggaagtcaagctagaatggaggaggaacaagcctgtgcttcaaccagggtccctggggagctggctggattcccccagtgggcagtgaggcatgtgcccaccaggggcctcagagctgtgttctggggagggggcaggcagagggggcagctgtagagctggggtcctggagggatggcacagtggcttcctctcgagggtgctcagaggcctcctactaggccttggcaagaaggggtggggcctttggggcctcaaacctcgtgaatcataggaaaagcaaatcccccttcaaaacacaaacgtttgaagatagccaaagttgtccctggattccctcctccttcggttcagggtcttattgctgcaatgcccttcaagaggggcggccgtgatgtagtggggagaaggctggacttggagccagaaggtctaggtgtgattttggccagttatggtaatttccctgggccttgatttccttgtttgtaaaaatcaggtagtgcaaccttcttccagggacatcaggcagagtgtaaatgaagatggaggtgttcaatccagttttcttgcatttaagaggtgctcaatacgtatttgttgggcccaataaaagcttttggttcatattctctgttctgattgtggtggtggtgatacaaatctatacatttgctaaaattctgtacacccaaaggacacaaactcaatttttttttttttttgagatggagttttgcccagtcacctgggctggagtgcagtgacacaatttctgctcactgcaacttctgcctcccaagttcgagcaattctcctgcctcagcctcccaaatagctgggattacaggcaccaaccaccatgcctggctaatatttttatatttttggtagggacggggtttcactatgttggccaggctcgtctcgaactcctgacctcaggtgatccacccgcctcggcctcccaagtgctgggattacaggcatgagccaatgcgcctggccctcaattttattgtgataattttttacaaaacaatgtccagtccaaattctttccctcggatggggtttaggattcccatttcgcagatgaagcaacctgagatgtttcttgtccccaccatcagtacccagctatattaccattgcctatggcagttctggggagacagacatgatgtcccccagagtgtaagcccttaaaacagaaaaacagaccggggagggctcctacattataacccatgaagtcaagccctttgggggtgtctggtggaggggccaaggtctatgctcaaatgattctctgttaacaagaacttcgggctgggcgcggtggctcatgcctgtaatcccagcactttgggaggccaaggcggatggatcacttgaggtcaggagtttgagaccagcctggccaacgtggtgaaaccccatctctactaaaaatacaaaaattagccaagcatggtggtgtacgcctgtaatcccagatactttggaggctgaggcaggagaattgcttgaactcaggagacggaggttgcagtgagcggagatggtgccactgcactccagcctgggcaacagagtgagactctgtctgcaaataaataaataagtaaataaatagataaataaaacaagaacttcaaagtctcagggaaactgagttgttcagaggtgttaaaaagtctttaggtaaagccaaggcctcccccaacccagggcagcctcaagcaggtggagaccctgcttgggggagaagtgaagcctcctcccaccatctacccggctgcctaggtccctggtggaggtaggaggacggaattagtgccactatgcaaagcagcaggaaaggaagggctccggctcagtagaggctgatgccaaaacaacctggttccctccagcagcccagagactggggaaaacacaggggccgcctggcttggcccagcctggcccagggtggtggagagatttacctgaaactgcaggcgtgggggccttacccacctgccccacctggaattccagagggaatctggtgaaaattggcactgttctcactagttcccctgtgctggtcttgattccccagttaaactggcagctcccacagcataggtgctcccttgctggaattcagagcaggaatagcagaggggcctcgaaggattccctccagggtcaacaggaagtggagcacagcctggcttgggagggaggctttgcacgtgcaggttgattgcacttggtctcccagctggcagctgttcccagtacctcccacagctggtgagctggagggccctagggaccattgtttgaggaccctggggccataggggacctccgatatgaggctgggaaagtctgaaggggtcccctggctaagaaccccaaagcttcaccatacaaagctccactcttcaggatctcactcttgatggctttgcatcaagctttcctaggcttcctgggaggtgggggtgggagtgttgtagaggcagggaaacccctaccctcagggagcttccagtttgcctggagaaccaaggccagtgtgagtagcacaaggcagtagctaagtcgccgctgcataggctggtctgagcagggcttgggcgaggacccaggtgctttgggagggcttcctgtaggtggaggcagagtgggactcaattgccgcttttcggctgaatgaagtgcaagatgagggtgtccctgctgaggggaaggacaggcccagtcactggccagctgctctgggtccagctagggcctggcatgcagccccgttccagggagaagaaacggggatgcgaccacaggctccaactgggtcttcggagaggaggggtggctgttacctttcccacaccctcgagggctcacagatgccacattcaaacaacagaagtgcccacatagatgttcctatccaccccaaacccataagatgccacgagcctgtgtgtggtttctcaggacacaccgtttattccacgggggaaggcactggaggccagggcctccctggggtgggagtggttgcgggagaggaatgatgttcctgtggctcttctggggcccagttgggtccatggcccttcccaagctctgctgggaggccctcggctccgagtccatttgcgggctctggaccagtctctgcctcccccatcccatgtgtggggacggatcacctcatagcacccccagaaggctgggtcccgtccatccccagagaactccctccaagttgctgccctgttgtccttctactccaggccctttggcaagagctggggaccaggggctggagacaaatggcagctctggtgggccagcttcagaggccagctggggggtccaggaaaggggttgggccatgagccaggcagctccgaagcagtcactgaggccagggagcctgcacccaggtcatggggcgacctggctctcactcctggcctgggtgctcacctacagaccacttcacttcccctgtccgcagcgtcactatgtcctcataggtggctgtctggtcaatgtccaggccctggagacattaagtggaactcaggccgggaccacaccccaaccacaccagcagatagtggccactgaccccgaggactcagagctgctgggcctgcccctctccttacctcgtaggtgtgatcttcctccatgccagccttgctgtcatcctgggggcggagagggatggagatcagagtgttagtgtcccccagccccatcccctgctgggccaggctggggagggccagggagaggggtgaggggtcaggagtgaggtgcattctgcaagaacagctgaatgaaggaaggaaggaaggaatgattgaattggtgagccagtggggacaggctggaccaagaaggccacaacgagagctggggagatggagaccctgcatatgcctggcctatgcggtggcctcctctgcggtcccccaaggcttcccccgtcccctgatcaccttgtccagcagcaggaagataggcacgatgatgaagaggatgatcagcagcgtctggatcatgatgataccatccttcagcgtgttcctctgcttcagctgtgccaaggtgctgaatcctgcggggacaggggtggggttgtgagcctgggccacagtccaccttttaggcctacaagggcagctccctcaggtcccagtggctctcctgagtgctctagggccatgaccatcaccacaagaggcaggccgggctagggtggggcggacagctacaggagcgtcccagccacctggcacacacccatgactcgcagctctgtgccgcagccctggtagacctccgaggtgttgttgcacttctgctgacagaagtagatgccattgtcctcaaaccggatgccttggatggtgagggtggcgagagattcgttctgggactcttccatgcggcccttttccagcttcagctgctggggattctcgtccatctcctgcttccagagccagctcacattgccggaggcgctgttcatgtagcagtgcattttcaccgtgaagccccgtttcctggctatgaaacgtgggctctgccagatccgcgaacaagcactacctgtgggtgccaaggccaggctcagcattccgcttggcatcttcctgagtgccagccccagcagcaggcccctgccctggctggcacagactccctgggcttagtccttgcttctcagggtgtgggacaggcaggaggctgaggttggagttgggaagcagagccacgtgagaggctgagccacatgagaagccacggccaagctctcagactccacctcttcccgactgccccacctccccttcgattttcctttggaagagccctgggaccttgccattccttcctatgcccattacaacagcctgacccaggccacacccccaggacctggaggcccacaggcctggcccctcctttcactgggctgccctgcacaggcttgaaatcctcagtctcccccgttcctccagggataaaggccaaattcctagtctgtcaactgagaccttcctcagtcgaccccctccctgcatgacttccctctatcatccccctcttccctcctgcagggactgggtccacttcttgttccagaaccctctttccagcttcgactgccttgttcttagtgagcactgcccgggaatccctgagcccctcacatagtgaccctgcactggagggctcacccgagactcagccagattcccagctagacaggcccgggcctgagtcctagaggaacccccaggctcccttgctatgacccagagtttagcccagcccttcagtggccaaggctggagggcatgtgtctgatgaggatgacagtgggctgggggtggggctcagaggagatcctaaggaggcctggggatgggaatcctggatggggagatcaggcaagggtgggaaggcggaccgcccccaggacagggaccatagtcggacacaggacatagtcgcacacaacttgccctcagaagcggcaggcgaggctactgacctttgggattccggtaccggtcctccgatctggctgctggtactggctcagctgctgggtgggaggaagtgggcggggccagtcagggcctcctctggcctgggctgccccacccctgcatgccctctatgttcccggagctacttcctccttccatgacagcagcttcaagacccctcggtcctccctgcccccagtacttgggagacagatatggggtgggggtaccggaagccctgcccccagccccctttctgcctttgaccctcatggtggctttgagcaggcatctgaatgagacaggagggacagggaaatctcagtattttgagaggccaagacaggaggatcgcttgggtccaggagtttgagaccagcctgggcaacatagggacaccctgtctctctttttttttttttttttaaagagagacaggaagaaagtcacagcccggaggatctttcacctcccagaggaggggaccacatttggatcttgcatcttccagggtccggttgggacagcctctcccctcccgacccccaggcaccgccctcagcctctcttcctcctgagcctagttcttccacggtcctggttgctaactctggtttgctcctcatgcccagctcagcctgatgctctccaggcaggagaggaactggggccacaggctcctgagcccatcaccacgtgcagctgacacccacagacccaggccccagggccatgagagggagacaggcggtaaagagtgagagacagaggaggagggtggagcaagcaggaggcagagccgcagggcccagacagctggagatgagagcaaaccccacaggcctcgtcgtgggttctgtacctgagagcagcagcagcaacgccaccatccagtggctgggcacaggagacaacgccagcctggccatggtcaccgctctgtccccgaccccaaacccgtgacaacgtccgaggctccttggaggaaaacgtgtaactgcaccggctgcagcctgtcccctccccgcctcttcctcaccaggccccttcctgccatgcaaattgggacccaggggaggcaccagctctccggggaccctgggggagggcaggcttttgtcagctgggccgctaaggtttggcggtcgcccagcttgggcagcacagctggggtcctctgtggatgcctctggggggcctctcagtcttctgggggaagcctgtgctcccctctgtctgtgcttaccccaccggtggtcatcccctgggccagccagcctcccctctgccgtctgccaactccccgaagggccgagcccggcaagtctctattcctgggccgtgagcgaaataggcacctgtcctatgaatgaacctgaacttagctcctctgtcctgaactattcctcacccagcgggaagaggagcactgaagaaggacagggcagccacagacccaggtcaggcatctggaggggcccagagcagagcctcttggctggagtgcaggcagccatgttggaagttgaccctgtggaggatgggagccacagaggttctggagcaagagcaggtcaagtgtggcagccactgggagaagattcagtccaggtcttggtgagaggcctcccttcctcatgctgtgaaagagtatgtaggggctgccaaacagggtggatgtaggtggagacagctttgcgaaaatccaccacgcagccactgggggcttcttcagggagttcttaactgtgggactctgagtgcgttgaattgttgtctgcaggtccagggggtcttgggcagggaacaggagctggtgtgggggagccctcaggtcctccagctgtatcctgcctgtcctcagagtgctggatggagccacagtgctcaggaactgatataaactcacctttgcgcccctgcccctgggtccaatgcagccccttcagagatgcccttgtgcagggcacaacatgcacaagtgtacacagcatgcttgcagacctcagccctgcagctgagccctctgaattttatgtttcctggcagcttcttttttgtctctcatcctcgacccccaggagaggaagagatgctaaatcgtcggtgccctctgtccacctctcactctcctcacaaccctccgttttccagtctgtgctggggcaggtctgtctggatttagggagaagcagaaccacctcccatgccatggttggaaggcagagggtctgggtggtccctctttagatcttggcctaggcctcggacctgataaggtgggggccactctcaaggggtgcaggccaggacctgagccacggaagtcaggggcaggagggttaaggtttcatccgaggaacagcccgttccgggcagccccagatgttctttcttgtttccagatgttccaaatgaaaaaacatttctctgaaaagctgtcagatgttcagttcatggaataaacagctcagaaatataaacatcacctgaggtcagcttgaggcccatgggcccgcatgctggtgagggtggctggagagagactgacccggggggagtggggcaaaatctgggagtctcatggtttaggaaatactcttcctgagcccctaacgacagagtccttcattaactttggggctagtgtctccccaaagttggggggtataactgggaaaggcttggggcacacgtgtttgtggggggtgtgtgtgtgtgtgtatgtgcatgctcacacaggtgtgttgcctggaccctgtggtgtggggcctactctggagctggtcctagggctcagcggactgtagggggcacggaggttggtggggggcagttggcacccatcctcaggtgacaggtgcgctaaaatctcagaaatcaccactaaagaacttatccaggtaaccaaaaaaactacctgtaccccagaaaatattgaaataaaaaatttaaaaaaacaagtgagaagcagctcccactccagggagggaagacacacacatcccgtggacaaggatgcagatgtggcctttgggcttcattcccattcatgccgggcagggatctgttttcaggaggggcggaggcagcgggggccccaccgcctgcagggttatttgtcacattttgagccgtgctgttccctcactggtgacaacagccctgagccccattttgggctcatgatgcccttttcttcccagaacaggaggcctcacaagcctacccctgcctctgccctcggctgcccggggcttcacattctgacttctgacgacacctccctttccaggaaggcaacatcaaaataaggaatgggggccagggtcgggcgaagggacaaggggctcagggggtggggaagcaagaaggcagcgacccccagccaccctaggatgccgggagggggaagaacctcagggaaagaagagctcagacccctgcctccttctccagcccaggtgtcctggatctgctgggctgctgtgactgggaaaagacctgctaagaaggacgtgggtttgagtcctgacccagcagtgtagcagccaggaaacctccccaggttaccagtggttctctactaagggtggctctgccccaacggagggagcgtctgcacatgcatcagggcaatcgcgctggtctcaatgaccggtgggtgcctggggcgggaggggcattggctggcaaagcagagttccctgccccacatgccaacagcacccatgaggcaacacccattcttaacctctcagtgaccaaggttcctcattttcgtaaaatagaaataagcccaatagcgcgtttttttgttgttgttttctggggtttttctgagacaagatcttgctctgttgtccaggctggagtgcagtggtgcaatctccattcacggcaacctctgccacctggactcaagtgattcacccacctcagcctcccgagtagctgggactacaggtcatgctactacacctggctaatctgtgtatttcttgtagagacaggttttactatgttgcccaggctggtctcaaactcctgagctcaagcgatccacccgcctcagcctcccaaagtgctgggattacaggcgtgagccactgcgcccggccccaacagtgcgttggtcgaagggcagctgtgcacattgaaggccatcctgcatctgaggtacttggtgaatgtggtggacggcacgccctgaggagggcgaggagtgcgaggagtggcacggatgcctggggaggtgggtagctgtgactgttgtcccaagttgtctctgtttctcacccaatatgaggccttttttcttccaccattcaaggctcaaaggatgtgtgggcttgagcaccctgcgctctgcaaatcttcctgtccctgatgccagagagggctccaggcgaggtctggaggaacttaaagtgaaaagaatgtctccagtgtcatttctaatagagcttatttggatcttctctcttttcttggttaatcttgctaatggtctatcaattttatcttttcaaagaaccagcttttttttttttttgagatggagtcttgctctgttgcccaggctggagtgcagtggcatgatctcagctcactgcaacctccgcctcctgggttcaagtgattctcctgcctcagcctcccaagtagctgggactataggcgtgcaacactgcacccagctaatttttgtatttttagtagagatgaggtttcaccattttggccaggctggtctcaaactcctgtcctcgtgatctgcccgcctcggcttctcaaagtgctgggattacaggcatgagccactgtgcccggcccaactttttgttttaattgatcttttgtgttgtttgtttcaatttcatttggttctgctctgatttttctcatttcttctcttctgctgggtttgagtttaatttgtttttgtttctctggtaccttgaggcatttgtggtcttccagagtttttgatgtaggcatttaatgctatgaactttcctcttactaccacttttgctgtatcacagaggttttgagaagttgtgtcattatcattcatttcaaagaatttttaaatttccatcttgattttattgttaacccccaaatcactcaagaacagattaatttccatatatttgtataattttgagggttccttttggagtggatttctagttttattccactgtggttggagaagatacttgatataattttgattttctaaaagacacatgcacacgcatgcttatagcagcacaattcacaattgcaaagatatggaaccaacctgagtgcctactaacctatgagtggataaagaaaatgtggtatatatacacctctttatggaatactacttagccataaaaaggagtgaaataggctgggcattgtggctcacacctgtaatcccagtactttgggaagctgaggtgggcggatcacgaggtcaggagattgagaccatcctggctaaccaggtgaaaccctgtctctactaaaaatacaaaaaattagccgagcgtggtggcaggcgcctgtagtcccagctacttgggaggctgaggcaggagaatggtgtgaacccgagagacggagcttgcagtgagccgagatcgcgccactgtactccagcctgggcgacagagtgcgactccgtctcaaaaaaaaaaaaaaaaaaaaggaagcgaaatagcatctttttgcagcaacctggttggagctgtaggccattattctaagtaaagtaactcaggaatggaaaaccagatagcatatgttctcacttgtaagtgggagctaagctatgaggatgcaaaggcacaagaatgatataatggactttgggaactcagtgggggaacgttgagggaggggtgagggacaaaagactacatattgggtatagtgtacactgctcaggtgtcaggtgcactaaaatctcagaaatcaccactaaagaaattatccaggtaaccaaaaaaaaaactacctgtacccccaaaactattgacataaaaattttgaaaaaaaaagtaagaagaagctcccactccagggagggaagacagcaccctgggaccactcagacaaccctgtagagattctccacacctcccctcgcactcacgcacagagagctgcaaggtggaaggtgccgcagagacaatggaacgacactggggggcagcctgagggccactccccatcccccacgccagtgctacatcacctcaggacccaggaagagagggtgcagaaatcctgaaaagaattaagtgcttacttgtctggaagaatacagccctgggagtcagaagttgttacagaaaataaaattacaggctgggcgcagtggctcatgcctgtaatcccagcaacttggaagaccgaggcaggaggatcacttgaggccaggaggttgagacaagcctgggcaacagagcaagaccccatctctataaaaaaccatccaggtgtggtggcgtgtgcctgtagtcccaggctcaggtgggaggctcaggtgggaggattgtttgagccctggagttcgaagctgcagtgagccatgattgcaccattgcactccagtttgggtgacagagtgagaccctatctcaaaaaaaaaaaaaaaaaagaaagaaagaaaaagaaaattacatacaagattatatttcactctctgggggctgtgggctaaacttgccgcataagaatattcttagtcacgggtccacgtgaccctgggctatctggggtcagaagtcagtcctggggtcagcgcctctgaggagagggagaggctgtgctgtgtaccccacaggcaccttgaggcctctgagatgggcagagaagtgaaggggcctctggggaggaggagctggggacacagagtcccaacagggatcacctggaagagagggagtgtggtgctgcctgttgtgggagccaggtcttgacccctgatcctatctggtctcttggattccagctaaggggcttttgtaaggaggctggagagagctggactgggccagagcggggagctggggcctccttatcctgcctggccccctgagaggctcccgtgtcttccacgtttggctccaatccccaccgaccctttctgcttctcactgccctcagcccccatccgcatccacatgctgacatgcagaagggagaagccacataccagaggcaccaaggagggtttattgtaagaactgtacaaaggagcccgcctgctggcctggcgtgggacctgttccccactggaccaggcaggaatgggcatccgtctgcaggggaggggccacaggcagggagaggccggacccggctcatctactcttcctctgcaacctgcacacagtccgaggagaatatccaatcaaacagatttctgaggctccaggggctgtgccagcccagggcccaggagggcaaggcagaggggcaatgtgccaggaaggggagactgcccccattagacgaaacttctgaaggaagagatggaaggagtggaggcctccttccatagaggagacataggcaggaggcagggagcagggctgaggccatgggtgtgacaacgagaaacaggaaggggaggagaggggagtgagagagagggctgttcaggcaggactgggagcaggtgagagagcatggtggacaataaagacaactctggcccataggcatggcatgtagatgtgcacacacacacacgtgttcacacactcaagcacacatacatgtcttgttttgaaggttttgctgcttcctgaattttaatcaaacttttcatgagaaacaagaagaaaaagaagaggcacttaggccaacagaatgccctgagtacacaccttaccacatgcgttcacacgcatccacacactcacagcacaggtccactctcccaggcacgggaacactcccagggacaggcctgcacagtatgacacaccagccgtactccatggaccttgaaacagtccagggcacacatatatacacatatatacaaagatacccagacacgtgcataatgcaggctccagtacacagtggttcacacacacacatacagtcacgcacttgaacacacacacagctatacacacaggcctataaaagcatacaagcagacacacagccacaggtacacacacaagtgaataaatccagcgacgcctgagcaggtctctcacccctcctcctgagccagcagaggcctggccctgccatgcccagaacagcgatgcagcagaagtgcttcttcaggccacaggaagttggaaggttgagcctgaaccagttgggccttccctgctgcacgccccagggtcgaaatatctaacctgagctcaactgtacattcttaggatcactttggggagagaggtgggaaaggtgagaaagagacgggcgtggggagatgagaagggagatctctgaggctggatgaggctcctggagccctggtggtgctcacggaggagtgaggcagggagagagggaaggggcgagaatcttcttactgagcagcaggtccctgactcccgctcaggtctggatgctcaggccatgtgcagcgatccagctggcaggacccagcctgtctcactcccccgtgcttcctagaaaaggacaattcattcccaagtggcatccttccttctgctcttcccctaggagccagccaggggagctacggacctggacgtggcctaggaagaggtttcaggagtcaccatcccagcccaaagcagcaggatccagtggccaatcaggttttgaggctttgaggagctatttctgaaccagtcacatttcccttttccagggaattcctgagctggcctggtgggtgaagctgcaccccagagtcaaagggggtgggctggcagtgccctggggttaggtgtctgcactccctgaggttaagacatctttgtctgggctggggctgaggggtctgagccacttcctggggagaggccagtgacccttaagactctggtgatggggggcaactgatccctccaccgcaggccagctcctcctcaagtgaggggcagagattcgaatgttctgacctcccccaggccaaaaggaggggcgacagggcccagaggaggtcagagcaacttgcaggttaaatcttggaggcaggggcctcagacccagcatggagcccctgagcgcaattcccatttcccatggtctgggaacgcaggcgctcgggcctgggtgtcagccccagtgtggccaaatcctgtcccccatcagggagccaggcacagtcccagattcaaagccctcctccctcactctgtgtgcaggcaccacgggggagctctggggactatgccgagactcagtgggccaccccgatgctgcctgctagacaagagactccttgacacctgggcgcacagtctgccctgggggaggggcgggaggccaggcagtgtctgaggggctgatgggcatcagccccatagtgggtccggcgtcccctgcctcgcccttctcctccgggcttggcgagctgctgttcccattctcgtggccatacatcttgctcatggtgttggcaagcagcccctccttctcaggggcgtcatccccgctgccgtcgtggctgtggcggtacatgtaggatgcctgcttcatggagcgctgtagcaggtgccggcggtaggccctctggatcttgatggcgcacacctcctcgtgcttcctcttgagggtggtggtgatgggctcgtaggacaccttggaggggttggctgccatgaacttctcctccatggtctgcttgagggcgtccatttccccagagtcacccaggacctctttggtcagggcaaagaggatgtccaggcagtggatcttgtcccctggcaccatgggcaagtccagtgtgatgagcttgatcttgttgggcttggcaatcctcagcggttcctgcagggtgtccacgaagtctgagaggcggctgtaggcgatgaactgggtggcgtcggggtcgaacttctcccatgtctcgtagaacatctcaaagtcatcttcaccaaggggctcgctgctctcctctgtggccacattgaagttctccaggatgatggcgatgtacatgttgaccacgatgaggaaggagatgatgatatagctgcagaagaagcagatgccgatggaggggttgccgcagtcacccttgacactggtgcccgggttctccaggttggggtcacagtctgggggcccgctgttgaggatggggttgaggagcccgtcccagccggccgacgtggtgatctcgaacaggcagatgatgctgttgccgaaggtctcgaagttgaacatatcatcgatgcccgactccttcttgacgtaggcaaagttggacatgccgaagatggagtagatgaacatgaccaggaagaggaggaggccgatgttgaagagggcaggcagcgacatcatgagggcgaacagcagcgtccggatgcccttggccccgcggatcagccgcaggacacgcccaatccgcgccaggcggatcacacggaacagcgtgggtgacacgaagtacttctggatcaggtcagagagggcaaggcctgcggggagaagctagtgaggacgctgccactggggaggggggccggcacagggtgtggggagcatgcggggctcagggggcccggcctggtgtgctctgctcaagtctcagagcacagcccagatgactgacaggtgaggctgggctctcccacgggtcttggggccaggggctgcagctttgtcttgatggaactggaggtgggataccctgaagtgggggagtgtaaggcccattcccaaggctgtttgcaaatgccactggtgtgtgtgtgtgtgtgtgtgtgtgtgtgtgtgtgtgaaagagacagagagagagagacagagagagagggagacagaacagctgcgtgactctgggtctccacttcacttgtttgtgcctcaatttccttacctgtaaaatgggaacaacagttcctgatcatgacattgttatgaacaacaggtgagataacacctgtcaagcgcacagcacagttgataataaatggcagctactttctatcataagcacacgcatgactgtgcacttctcagtgcacacagacatggaaccatcttttacacttttcgctcagtatgtgggcacctgagtgcacgtcttctggtcagttgtgtgtcctgaggtgcatccatgtgtgcgcgggtgacgatctgcctgtgtgcacaccatgtgcctttgtgcattgagagtgaatggcaggcacgcacaggcatgtgtctgggtgagcgtgtgagggtgcaggggcaggtgtgtccgtgtgaggatgggtcttcccgagtgcctcagctcagtgctgccctgccggtccagcccgccccgctcacccacaatggacaggatgacgaccacgaagtcaaagatgttccagccaacggtgaagtagtactggcgcagggcgagcatcttgagcacgcactcccctgtgaagatgatgatgaagatcatgttgatgttgtacaggatgtccaccttgagctggctctggttgtctgtctccaccatcatggtgaccatgttgaggcagatgaggatcatgatggtgatgtcgaaggcctgcttcgtcacgaggtcatacaccatgccctggatcttgttctgcagcatgggtgggagtggatgtggaggagttggggtggccaggcccagacaggacatggacaggcaggaggcacaggatggcaccacagcatgacagagatgacagagatgacagagagagagagagagagagagagaaaggaggtgttgggggttgtggtggagtcagccaggggaggaggggtgacccatcagatcatgacaggtctgggaccaggtcattttatggggttcatggtcctcccttcaagatcccccagatgctcctcccctttcttccaaagtcattgctcctgggtagggtgtctggacatcctcctccttccacttgtgggagcccttgccccaggggccactggggtcccaggtgggaggtaggtgggcactgaggagcttcgtgggaccaagtgagggtaaagcactcactagagtttcatggacagcctctgtgcatatggtgtctctgtggcactacaaagaggcgtccctccctgcaggtagaccaagtcccctgcccctggggtgggcctaacctcacccagggacacagcctggtgggtggaaggcaggaaaccttttacccccatcagtcccctaggcaggagcctggcagcacacacaggacagggggcccagaggtctgtacctggggccggggaattggcttctgaggcttcttggagccaagcttcttcatggcgttatagtatttcttctgttcctccgtcataaagatgtctttcccccctaagtatagtgggatagggcttgtcaggttgaggtgcagttccccttcctgcctccaggaccacccccacctcagtggggcacctcacctttaaggcagcccccgcccctgttgatcagcctggaggaagcgggagggtcagagatggagggacaaggggagaatgcgggaccgaggagaagggagggaaggggagtggggatcaatgctgtcttgcagcctgtttctggctacttttcatcaacatctcgctgagccctagagtaacccacaaggcaggttgtagcagcctcgtctttttttttgttgttgagatggagtctcgctctgtcaccaggctggagtgcagtggcgcgatcttggcccactgcaacctccatctcctgggtttaagcgattctcctgcctcagcctcctgagtagctgggattacagatgcctgccaccacgcctggctaatttctttttttaattttttttgtatttttagtatagacagggttttaccacgttagccagggtggtctcgaactcctgaccttgtgatccgcccgcctcggcctcccaaagtgctgggattacaagcatgagccaccgtgcctggcccagcagtctcattttacagataaggacaccgaggttcatggaggccaagccacttgttcaaggtggcctggtgggactgggacccaagctagctgcctgaaccaacaacctggtaggtgctcaggcagcgtttgtgggtttgtgcaatggagagtggacaaaggaggcaggagggaggcccagcaccgggagggcccgaggggctgggctgatactcatcttcttcttctgctggttgaagttgtcaatgatgacgccaatgaagaggttgagggtgaagaaggagccaaagatgatgaagatgacaaagtagaggtacatgtagaggttcacctcgtactgcggctgctcctccttctgtgggagccacagggtgggacggcgtgggtttgcacgctggcttctccctgccccccacagccctgagggcaggacccatccacccccagggctgccaagtctcggggacagaacgtgctgccaagtctccctcctgtcttgagtcctcttccctggctcgctcaccagccacatctcagcgaccccgactcacctcccgggagtccacggctgcatacatgatgtccatccaacccttgaaggtggcctgagagagtgtggttggggagtgagccggggggctgctccctgctttcatcatccatgagtttccctcccccacccaacctggtcctcccctgccagaggccgcctgccagagccccactgggctagcatcaaataaagaccagagaggtctagacactgcctggggatcccacagcattggaagcagggtgggcggtcccctaaccaggagtgacactggggttgggtacaacgagaggaccggggtggggggcacctccatccaggttcccggcaggggtggtgggtcacactcaccacctgcaggagggagaggtagcccagacccacgttgtcgtagttgaccttgacattgagccagcggacctggcctgtgtgcatgaggctctcgcactcagacttgttgttgacctcggagatgtcgaacctctcagaggtggtggtgttgatgcagtagtagaacttgccggcaaacaggttgacacccatgatgctgaagatcagccagaagatgaggcagacaagcagcacattcatgatggaggggatggcgcctaggagggcgttcaccaccacctgggggccagggggtccattgccagtgcctctcccagcctctgagagagggctccacatctctacgccacccaggggaccaggcagagctgggcattgtcaattagggagggcttcctagaggagggccgacctgctgggctgtgtgtgtgcaggttgggggtggtaagggggagggggagggagctgcaggcctggtggtcaagagggctctctgcttgactggagccatcagcccagagtaggggtgctgggtttctctggaagcagcctggtcacaggtcaccaggcaggagacaaacactctttgctcagcccccataggaaactcagctcacgtgacccagcccctgctcatgggttttcagccccagagccccagacacaggcacagaaaagagggcaccagggtctttgaagcagcaggagctctgggacagaagccccatccccaccagccctagtcacacagcccacctgaccactgcagactgggctggatctgacacccctctctttttaaggaggagccatttcatgacctctagagtgggtggcacaagcctggtgtgcccaggggagctctgttcctggttggggcactgaccagctgcatggccacaggcagcttgtttcccctcaacgggagggctccctggctctggggggtcagagggcccagcattcggctggcctcttgcagggacaggaaggggccgcttgggggggctcgccatggcctctagatttgcagaaatttgtcccgctggagcaggtcttgctcccagcagatctctcttcctggggaagtcccatttttcttgcccccccccccaccccgccgcaaccctgtgtttacctgccacttccgctctccagggcctgagtggatcttccccaaactgaccccaagctcaagggcatggccccaaccgtgacgccaagctcatcagtggggggtgaggggaaggctcagagccagggtgcaggcaccttgtttcaaagccctgggtggctcagtctgaggctggggagggccacccataaacccactcataaaccacccataaacaccacataaacctgccttccttcctcctcttccctggccgtggggccctcctgggtgcttctgcagtctctgctcccctcaagtagtggcagaggtaagctaagggcgggctggatcgggggctgagagtgggaatggggcaggcagaagatggcctgcggggaggacagctaggggaggtgggggccagacctggcctcaggcagggccgtgggtccaagctctctgcttccctctggtggtggttggagtatagacatgcaccctccaccctgcagtgaaggtggccggtcccccatccccagcccaccccagaggccccttcagcacccaccctcatgccctcgaatcgggacagtgccctcaggggacgcagggcccgcagtgtccgcagggatttgatgggtcccagctccgagtagcccagccagttggccaccaagctgatgatggagacctgcaggggaggggtgaggggatcagtgcgtgcaaggcccccagcctcccctcaagcccaggccacgggggtcttcctggactcacagctcctggttgtctcccttagatcccctccctagtgggtggtcctgtccggtgggaagagcagccctgggacctgtcccagtacctgtaggagcctggcaccacctcagtgatgtcatcaaccaactggggatgactgtgagtaggagggatggtacccgactccttcggggaggcctgtgagcccatctaagaggctaagaaaatcctccattcctggccgggcatggtggctcacacctgtaatcccagcactttgggaggccaaggtaggaggattgcttgagcccaggagttcaagaccagcctgggcaacatagcaagatcccatcttaaaaataaataaataaaatgtatgaagtaagaaactcctccactcctattggcagggatggtaagtagccctcctgcctgctgtcttcccccaaggcctcctttccctgaggagaagggaaggcctcccagtccctaacccctccctgggcagctctgtctgagaagggcagcactgattgagggtctgactctgggggtggcctcgggcaggtcctgcccttcagggcgtgggcttcctgaggtccccgccacactgacagcctctggatgtagctacggggccagcgtggggggactcacatccacgatgaggaagtcgagccagcaccaggcgttggtgaagtacaccttaaagccgtaggccacccatttgagcagcatctccatgatgaagatgtaggtgaagaccttgtcggcatattctaggatggtgcgaatgactcgccgctgctcaatgtagatgtcctcgaaggcctgggggcaccagcaccaccagggtggctggggtccagcaggctggggtggcagccaggtcccctgccctgctctatgctgctggttcccgggggtctgccgtgggggcccagcccaagggacaggctgtccgcatctcctggactcccaccacccatcatggggatgagagcgtttcccagtggggagaatccctcagccccccttctccaagcccaacaacagcaaattgccatcatctgctgggcaggtccacagtgacacatcttcagtcctgcgcccccagttcccaggggtctcctgcctccttatcagcagagagtgcacaaaagtcagcacccacgtaataagggaggcacctctgccatgttagaaagtcagcacatcctataacctatcccggaggcacagcgagttcctttaggattctcagggtttgggactgaccagagcatggcccttcctgtgtgtggagacagggagccccaagaggacctgctgtgggcctggcccctgcccctgacccgtgctcccaggcagtgcctaccagagccccactgctgagcaggatcatgaagacaatgaaggtctcgaaccagttgtgctcgacaatcttgaagcaggccctgcgcagagtccaccacttcttcccacggccctgggagatgtccacgtagaggcagggccagcgctgcacgcaggctgatggggtgaggggggacagggacaggcaccacatcatgggcctggggttgccttggggtgcacagtcagcgccctcccatggcatcccaggatgcccctctccagctcccagacccagggcccccacctcctccctcacccagctccatctggctcacatgggggactcaggacctcccttcacagctggatccaacatgcgtcaatggctgctggggatgggcatgcagaggaaaggcctcctggcccccagccccagtgctgccccaccccccacctcgcccaggcggtctccatcctgcacagcccagcaagctctatggacaaggacatttctccagtgccatgtcctgaaggccttgctccctgaagatggaggggaggatctcaggagctgacacccacactcctgcacgttggctccaagctaggtctgcaccaagggctctgcatggatcttgcaccacagttctgggcatgcactgccaccacccctagacacgtgaggcacggggatggccaggcagccccaggtccgtgtgcttttggtcctggtgtagcctgccccttgcaggggctgcaggcctgggggagacacccagatgaggtgaggggtgccctcaccctcagtgaagcactcctcaggctgctccccctcggggttctcctctgcctgctcctcagggtcctcctcggggggcttgtagtcagctgtgctgcagacggacgagttcccatcatagagaggctgcggcggcttctgcggaggccacagggtcacatgacatctgggtccctgagagaccccctcatcctcctaccagatggggcaggatgggagaccagaagggaagggaagaagagagggaggagcaaactcatccattcattcattcatccagccctggatggtcgaggaaccacggggacgtaggtggccctggtcatgcccgcatgacacttatataaggagtggggcggggctgatgcctgggaagggacggtaagggcatgaggacacatgcgaaggcctcagataagggaggaggcggggaccccggcccgagtggggggtctgggaggcatggggggcctgaaggtagctctgagggggcaggggtatgaaaaggggtcaggatggagccaggctatcacagccctcagaacatgggcgtgtggtgcccctagcgtctgagccttcccacccgcagggtctgtttggctgaggaatccagaaagggtggaaaatgttccccagccaaagcctccatccagtgccaagggaacctgatcagtgttgggagcgggagtgggggaggcgggtgctccagccgggccaggcttcctcccacctcctcctgctgggccaggccagcttcccggccccagactccacccggcaggggaccccttcaaggctgagggtgaggcctctgaagagaaggaagaagagggcaacttggggggcagctctgtatccagagtggtgaccagaaaaccaccatggccggggtgggggtccttgttttcattagactaaaagggaaactgaggcacagagtgttaggtcagccagggcatccactgagttgcttgccccgattgtgcactcaactccctaaatctcccttggagttgtgctcgccctccttgaacaagtccccaggccccggccccggccccggggagcctgggactttggtgctctccagctcccccgccacctgagtgcctcataccgaggtctgtgccacagttgcctgggtatttatagctcacaggcactcgcttcctggtaagccagcatatttggggggaataaggagtcaaaagctttcagggcaaagttcattaggctcaggctgatggtgcaggggtgggcaggggccctcgtcctagctcctgtatgagtcctttccctgccagagctggacagtggggaagggggctcaagacccaggcagggtcagcctcagcctcagcctcagctgctgggggttaccaccgctgcgttcctgtcccttcctcgacctcgcagtggaggggtggggaggggcatctgagcccagcagcacaccccctgcatggctgaggggtcagggctcctgcctgaggcttctgtcctccttgtcctcaactcccgttggcccctagctcctctcctgaatcccctgcctggatctggcactttggcccacactgggaggttgggagcagacccaggtggggtctaaacagagatagaggataagtgtgaggactgggcaaggggcctcaaacccagaggagaatatgtaagagaggcctctcaggtcctggtcctggagctgcggtgcccaggtaaaagcagcatgtccaagggcaccacctgctggtgagaggggcccaggtgttctggtccgagggaatcagggtttctggacagacagggttgatcataataaccacatcaataacgatagtgactgccaccactcacagggcgcggactgcatgctttacatacagcgtctcacataatgcttgcaacaatgccatagggcaccacccccattttacagctggagaaactgaggctcagagaggacttagggcttgctccaggtcacaggagaatttgaagccgggtctgtctgagccccagccccggctcaccttgctatcctcaggctctgagaaagtgtcggtttcctcctcggtgggcatctccaggtcggactcctcggaggcgatgggcacctgtatggtcaggtaggggttgttgatgaagttaaggtggtccagctcgaggctggatggggggccgtcagccaggcccatgtggttcaggatgtgattgtccttcttcaggtcctcctcgggcggctccttcttctcatcctcgggggcagtctcccccgcctctccagcctccccggccccgtcagcctccccgaggctgagcatgatgtccttggggctcaggatcttgccatgcagcagccccaggaggaaggccttggcaaagccgatgcccaacttgatgcgcccgatggcaatctgcaggttgttcatctcgccatcctcatccgaggctgccagactgtcggcgctgaaggagctcagcagcagagccaggaacaggttcaggacctggggcatggggtcagggggagcctcacatcagtccccgggacccagagggtgccaccttcagccagcacaggggtcctcggtctacagatccaaactaccacatgttgggcatttaaaagaacgccacctaagaggtgttcacaactgctcatggaggtgatggttattatcccttctgcagatggggaaactgaggcttgggcttctgagaggactctgctacccagggcagaggcagggtttagggaggcctgctgggggacaggaactctctccatgactgtccttttttttcttttttttttttcgagatggaggagtctccctctgttgcctccagactccgggctggagtgctgtggcgcgatttcggctcacggcaacctccacctcccaagttcaagtgccaccatgcccagctaatctttgtattttttgtagagacggggtttcaacatgttgcccaggctggtctcaaactcctgacctcaagtgatccgcctgcctcggcctcccaaagtgctgggattagaggcatcaccacggtgcctggcccatgactgtcctttacctccacttctggaggatgcggaacaaagaactgggctcaagtcgccgagcttccaggacttactgggaacctttatcttttgtgccttcttctccacctctgttaagtgggactttatagaccccgcactcctggagtgcagaagcttggcccctgctactctggaagggacatctgacctactatttaccctcttttctcctcttggggtttccgactccatctattctggttcttgtcccacatccctacggaaagacttaggaggctactgctgctcccccccagcacccccacccactttattttccagtggatagacatttcctgagcccccgtcactgcatgaatggcctcagggagctcacagaccagcagagacagagagcagatcaatcacatgcaatactgtgggtttgggtggcagcagagactggagtgcacagcttttgaaaccacattgcagggctctgaaccccagtttattagctgtgtgctctgaggcaatttgcctcactgccctgtgcctcagtttcctcatctgtaaaaaggagattatccaagtgttcctcccattgttgtgaggattaaaggatcaataaaagcccaggcgcagtggctcacacctataatcccagcactttgggaggctggggcaggcggatcacgaggtcaggagatcaagacaatcctggctaacatggtgaaaccccgtctctactaaaaatacaaaaagttagctgggcgtggtggcatgcgcctgtagtcctaactacttgggaggctgaggcaggagaatcgcttgaacccgggaggtggaggttgcagtgagtcgagatcacgccattgcactccagccggggcgacagagcgagactccatctcaaaacaaaacaaaacaaaaaaacaaaaaacaaacaaaaaacccatcaatacaagtagagcacacagtaggcactcaacgcatgttggctgttattatgtttgaaataatagaaagctatacaaggtgctccagcctggccaacatggtgaaaccatgtactaaaaatacaaaaattagctgggcgtggtggtgcacctataatcccagctacttgggaggctgaggcaggagaatcacttgaacccgggaggcggaggttgcagtgagcccagattgcacccactgcactccagcctgggtgacagtgcgagaccctgccttgaagaaaaaaaaaaaaagaaaaagaaaaagaaagaaagaaagaaagttatacaaggtgtaggaagagtgtggtgaactctgaggccagctcagcattttatagatgagtaaactgagtcctagagaggtggcgtggcctgctctaggacacagagcatagccaggactcgaaccaggattctagtcattgtataactttagaaggcatctttcacttagcctacaaggtgaatggcagccctgaaggtctttaatgtggtcacccttccttctaccagtctgcctggccctgggcagtgggaggaaggagaatcctggctggggtgagggtcccagctcccatcagccagaagcatagccaggttcttcctcggagccctgggggagtgagagggcatggggaattggggagcctgcacttgcagatccgccacccttggccgtctcctcggcgggtctcactcctggctctcaccagcctcctccaaggtcttctcgtcattgtcttcactacattctgttgattatattctgttaatcatgttaaatactctctttaaaaactatctgaaaacgctctttgagagaatgtgctaggggaatttccatggctcccttcctccccgccatgtcccctagaggcttttctgcctttgccccccaccaaaacgcattagtctttcttctccctctctggggggaggcatccagttgccagaaacacatctgagatgggaattagctgctctctgggtcagcagggtttgcacacggctcctgcccaagacagaaatagctgccccaggcatgggggaagggaggaggggagggggccgacatcaatttccctgggggttctgtgctttgggttacctagtcacttcctcttcttcttcacagttacccgcaggaagtgaccaagtgccataggtgcaggggatgcgggtcctcacactctctggcagggtgccctggtggcctctggcagacacctgcttctctgaagcctggggaggtggtgggaggggacagtgcccaaggagctgacagtgccacctccctgggccgttccactccctctgagcaaactgggagagccacagagctgggctgggaaaggatgtcagtggtgtgttcgtgtgtgcatgtctgtgtgataggggtgacaggcacacagaagcagggcctgtactggttccagactctgcagccagattgcaggggctcccgtcccacacacgggacagactcacctccctgagcccctgtttcctcatctataaaacatgaaccagcgcgcccctcacaggtgggcgtgaggatgaggtgaaatgaatacatgtgaagcacccagaatgctgggtaaatgctaaataaatgtcagctgtcaccatgcttctgctgatgctgacgttatcattattacgatactgttgtcattgatgttatcgttactggagttacatggacccagttccagcaccagctctgtttctcactagttgtgtggttctgggcagtgcctcctcgagagtgtggaaataacattacctgtctcatggggtggctgagagaattaggggcaatgccagtaactccctttggcagggactgacatacagtaggccccccactgccaatacaggagcatcgccctggtggcgggaacctaaaccagcactgccctgccgcacgcctgcaacacctgtactcccagccacgtggccaggcactttggtaagcacttgtaagcgcatgcgtaacataatccttgcaaccacccagtgaaagagtcatccccattttcatccccgttttccagatgggaaaactgaggcccaaagggttaaataacgggctcgaggtttcccagtcagtgagtggcaaagtggggatttaaaacgtttctgagtttccacacatagaaacagcaactccctgaagactcagtcacccccaagtccttagacttacatcaacaaactcctactcagggtctgctctccccatccccaatcctgccccaaagttgggcccgggcaccttccctctctctccccactccctaagaccctcctttcagggacaggaggcctgggttctcctctgtagctgcagcatagtcttcttctgcagctgaggtgacacccccttccctctcttggtgctgcccccagccagagatcagcaatatctgagaagctctgtcgctgcagctcagggattccataggcctttggggaacatggggacaggcgtcttcccagtccctgttgcccagggcagcaccagccactgcagggggcagctgggcacagcactgcagggctctggcaggagtgacctccactgccaccccaagaaggggagaagtcagggtcacctccagaggccctagccgcagaaatgctggccagctggaccatggccctataccctggctctcacctcctggccccttcctctgcaccagcccctcatgccaagccctgaaccacagtaagcggcagaagagatgcagtttatgccatctctgcattttcccaatatctgcacctgtttcttttttgttttctagagatggggtcttgctctgcccccccatgctggagtgcagtggcaggatcacagctcactacagctttgaagtccacggctcaaaccatcttcctgcctcagcctcccaaatagctgggtttggtgtgtgccaccatgcctagctaatttttttcatttttccattttttgtagagataagagtgtcttgctatgttgcccaggctggtcttgaactcctggccttggcctcctaaagtgctgggactatgggcatgagccaccacatccagcctgattctctttttcggcgcctggaccataggccctggagcagaggaggtcaagagggtgggagaaggccaggaggcccaggttcccccacaaaactgtgcctttgtacacactatggcatcatctttgcagtgacctcatgaactccctgttgtttttcttctatgtgagggttagagaacccagcttgactagagagcagcagttagctcaaggtcacacagatgatggcaaaggagctgggactggaatgtgggtctgtctgactcattatcatgttgctttactcaaaacactaggttccaacagcgctactcatagcatggtcccagaaccaccatcagcatccactgatcagcatcacctcggagcttgtcagaaatgcaggtccccaggcctaggcccagagctgctgaatcagacactctgggggtggggccggggatctatgttttaagtaactcctaagtgattcttacacaggttaaaatttgagaactacggggttaaaccacataaaattgccattttggagaggatgtgttggggagatagaaaacagtcaaatatcaggtacatcttgtacgcttcccgggtgagggcaggggccacccagccagcctcactcaccacaagattgccgatgaccatgaccatgaggaagacggtgaggcacatggcttggccggccacctccatgcagtcccacatggtctcgatccactccccgcacaggatgcggaagacgatgaggaaggagtggaagaaatcatgcatgtgccagcgcggcaggttgcagtccaaggcaatcttgcacacgcactccttgtagctcttgccaaacagctgcatgcccaccacggcgaagatgaacacgatgatagccagcaccagcgtcaggttacccagcgcccccactgaattgccaatgatcttgatgagcatgttcagcgttggccacgacttggccagcttgaagacccgcagctgccaagcagggagggcaagggtgaatgaggcccagggaccaccacccaaggcagccccagccttaggagaaagaacagtgtcgagtagcttgaatctccagccccccacaccatctgagtcctcagtgtgcccttctgctaaatgggaacactcattctaccacctcaggcccttcatgtgttaaaaagaaaacaagtccaggccaggcgcggtggctcacgcctgtaatcccagcactttgggaagccgaggcgggtggatcacttaagctcaggagctggaaaccagcttggctgacatggtaaaatcctgtctctactaaaaatacaaaaaattagtcgggcatggtggcgagtgcctgtaatctcagttactcaggaggcttaggaaggagaatcgcttcaaccagggaggtggagcttgtagtgagcagagattgcaccactgcactccagcctgggctacagaacaaaactccactaaaaaaaaaaaaaaaaagaaaaagaaaaagaaaagaaaagagaaaaaatgtcattcgtcattatctgttaaagatacagactatggctgggagcagttggctcacacctgtaatcccagcactttgggaggccgaagaaggtgcatcacttgagcctaggagttggagaccagcctgggcaacatggcgaaaccctgacctacaaaaattacaaaaattagctaggcatggtggtcccacctatgcaggaggctgaggtgggagaatcacctgagtctggggaggtcaaggctgcagtgagcagtgatcgtaccactgcactccagcctgggtgacagagaaaccctgtctaaaaaaaaaaatacagactaaagtatttacaagtgaaattatatgttgggatttgctttcacaataaaaattgggggacagatgcaacaggaattgtagaatgttgatagttgttgaagctgggtgataggtacgtggaggttcattatactttctctatacttttgtgcatgcatgaaaagatcccttgataaagtttgttgttgttgttttttttgagacagagtctcaatctgttacccaggctggagtgcagtggtgcgatctcggctcactgcaacctcagccttccgggttcaagtgattctcctgcctcagcctcccaagtagctgggattacaggcgtgcgccaccaagcccagctaatttttgtgtttttcgtagagacggagtttcaccatgttggccaggctggtcttgaactcctgacctcaggtgatccacgcgccttggcctcccaaagtgttgggattacaggcgtgagccaccgcgtccagctgataaagttttaaaaagaataatagtgctccttatggggtggtgaaaagacagaaattcagaggtcccaatcctactcctaatgaacttccagagccccggctttcaggtctgcagtatggggctggagttcctgctccactgctgctcaaggtcattaaggaatcaaacccagtgttggcctctgtcacttgggtccccccagcagccctatgaaagaagacagggctctccttttctctgttttacaggtaagaaaggttctgagaggtaacaggtgtgcacaaggcagaggaggcctcgttttcagccctctagcttcctggggtttctcctcccatccctgtgcccaccctccttagtctcctcaccccacccccatcccagcccctggccctggggcttttgtgtaccagacggaaggagcgtagcacagacagtccctgtacgttggccaggcctagctctaccaggctgagggtgacgatgatgctgtcgaagatattccaaccctgctggaaatactcgtaggggtccatggcaatcagcttcagaaccatctctgctgtgaagatgcctgtgaagacctagggggtggcatgaggccctgtcacagagcctcggggagcccagggccctggaagtctcccacccaactcccacctcctggcagaggctgcgggggcggaggggaaggggtccagagccctgagaggagcaggagtggcatgcatggcccgtgtgtgtataagtgagtgatggaggcaaaggccaagtcatagggcctaggtgggtacaactctgagacccgttcccattcatttctggccttgtgacagtgggcaaggcacttcactccttggagacccaaccctgtcataatattcaacatttgcagggcgctctgtggttcactttgtgacttcactggtatcctgatctctacaatgttgggagggattctcacatgcattccacacatgagcagttgaggctcagctagctgggcagctagctggcatcacagcacccacatgggaacgagccacatctcaagcccagttctcaggtgctcagttcagcatcctgtctgtatgcctacagcctctccacagggaccactcccaggatcttgcaaatcttggcagactcaaaggtttagggcagggaccaaaaggagcaaaatcagtgagaagaagaccagagcttcccctgccaaccctggacatgggatctgaggattgcacagtccctgaaagctccctgggcacggcccccctcctgccaggcaccagctgccctgggtccacagcctgcctgggcacatgctgagcccctcccagaggctgtccctggccacagcaggtgccaaggcagcagcatagtgtgggcagggggtgggcaagcgggcaggcccggtccatcacgcacatcccagcagctgtgccacgagtccagagcacgcccttacccttccagcccagcctggccatggctgcctcggcacctctataggacagacgtgcctgcctcgaaggctggggagcccagggtttgattctcgtgccacccacccagccctggttctctcccagaccccaaatcttactctccctggcttcccctaaccttcagggttggggagcatctcgcccatttgccgtcctggaaaaattgcaaagggaattgggaagggtggggcagggctggaggaggaggcggcttttccctttgtcaggctcctctggggccggcaatgaggtgataatgctcctaatgggcctggataagcgggcggatcagtggtgtcaacaatagtggagcaggaaagggctggagagaggagaagcctggccacgctggagaaataggtgagggttgggggagtaacccctgcagcccactggtcctgggtagccagggctataggtcacactgccagatcccttggctcctttcaggcccatgacaacttctggaagtggacagacttgtcagctagccccttcacccctatctccacacccccatttcctcacccctgcttccagggcatggtctggatcccagatccccaagaatctggaccttaggaagcccagcgcctcaaccccatctccctgcccctaaatgtcctgaaaccccagttctgtgtgccacagatcaccccaagtacccccccccacatcaactcatgcctcccatatgctgggaaaataaccccagctgtccgcatgtgtcccccaccgtgccctatatttacatacagccagacagctccactgggccctaccccctcccatcctgcccatgaatgatcccctcccccgcccctccctaccaggttgcccacagtgagcacgttgtcaaagtgctccgtcatggggtaatgttccatggccatgaagagggtgttgagcacgatgcagatggtgatgcccaggtccacgaacgggtccatgacgatcaggtggatgatgttcttgaacttcagccacggggcgcagcagttccatatgagcactttgtgggcgcacttgtaccaccatggtgggcacttttggtgggcctcttccagttctgggagaggggtggtagcaggtatctggtgaggattatcccctcacgtgcccccggctccagctagagcttttgttccaccttccaagccccgccccttagcactccacatctcaaccctctagcaaggcctattccaagttccaccgcctcttgcgtcacccttactgtcacctcccctgtaacctccgccccacatggcttcaccccaaagccccgcgctctgagcgcggccggctccaagctccaccgcctcagtgagcaccctccagatcccgccctctaacccccgcctacagccccacccctggaacccccgcgtcctcagcgctccgccctctacttcaagttccaccaccactcaccgcatcaccctccggacacacctctctaaaccccgcccacaaccccgcccctcaaagccccacctcctcaaagccccacccccggctccaagctcctccgcctcacagagcgcatcctcatgtccgtcccctctaaaccccgcccacattcccaactcctgaggaagccccgcctcctcccgaagctccgccccttagtgcagtaactcacaggaccacctcctcagcaaacttttccccaagccccgcctttcaatgccctgcctcaagccccgccctcttgactcaccccacaaagccccacccctcagggagctggacaggacgcccaccccctgccagaggcccagggctgcgagcctggcctgtgagatgccctaatctgtctgggtccgagttcccagggagaggcgggaggccactgcaggggcttgggttccagccccatgagctgctggctagtgcaactctgcacagacagatccctcggggatgcactgtcggtaataccggcccctccaaagtgtccccagccggtccatcctttcccaccacagtggccttcaagaaacatcccctgttcttgccaccccaaagccacgagtgctttgtaaggaccgtgggacaaagctgttcctcctcctcctggccttggtgggctgtttggctgtgtggaaatatggggcacggtggggacacattcggagtgtccttggcccaggcacgatctcacttactcatcacagcaggtaaatacaatcagtgcctcccggtaaatacaatcagtggctcccatttcaaagacaaagaaaagggactggagtgggtggcagccccatggagaccctggattcatgccggggagggtggctgaacctccctcccacacccagtaattagcacactgagtgtcactcaaagcctccccagtctgcacctccacccctaccctgtgcttctgcaggtgcccaaacagtgtctgaggcccaaaacttctcacagtggtcccaggaacggcagggtggagaggcctcctcccccagcattccctgggtaccctctggcagggcatatgggcacctggatacctgtcatacaaggtcaggtgacatggtgacctctagagatctgcaaagtcctgcagggcccccaactccctggcacaaggcaagccgacctggggagggaaccacatctctgtgtgtcagaattccttttctctattgtccctttttcctgtgcttcctccttccctcctgcctccctacttccctccctctcatccatccatccatccatccatccgtccgtccatccatctgtccatccatctgtcgtgtcgtgtctattcaccctctctcatcatgacatccttattcttctgagattcagcatgtggcacagggattggggagtctgtcactctgtttgggcagaatttgacttttggcctttaacttttacccagagaacacttgaggagcaggatgtccagtttccggaacattgggccttctggttagtattattagcctgtgcttcccattgggcagtccccaaggccctcccggaagcccccagttcccatagcagcctggccttgcagctagaactgggccaggttaagacaggactatatttgtgacagccagaaatggctgtgataaatatagtataaatatagccatttcttctatgccaatattaagttactgtcctgaagctggtccagccaggccccaccctgacctcaggggcctgaatgggtagagggggcacagggcactcaccttccatggcatccctatcctcctgaatccagtccagccaggctccacccctacctaagtgggcacgggggcacaaggcactcaccttccatggcgtcggagatgccgctgtctccgctgctgctctgcctcggggctcccttctccccttgcgatgtgtccaggctgccattgcagtctttgccatgggctgggtccccatctgcctccccaccttccagagcttgggcggccttggcctgtagaccagcaagagtgactggcaggaagtccagctctgagccagagggatggactaattgaccctcagagcttcttccagagtccttcagggtggcagcccctcttcctggcctgtgtcaaacttagtgcaggtgggggagggaccaacctccatggtggtgggggtgacagggtagggaccaaagtgactaaagaccctctgccctgaagacccttgactctgatgccctgactaaccctccacttgttgacagaatgagaaactggtcagccgctccctgtggcctcatcaggacctgcccttccctcagtatggacctatccactacccagaaagcatcacaaaatcagaaatatttgagctggaagaatacttcaggtttagctactccagattccttgttatagacagggaaactgaggcacagagcagagaaatgctttttctactgcttggatccctccatccccctgccaccagcaaagctcccagcccagggccttctgctccttctgcctcaaaacccctacccctgtaccctccctcaccctcggccccccagggagaagccagtggcagccccggctgagggcaggtagaaccctgggtcctctatctcctttccctgagtccagaccttctccagctcctcctggtgctttttgaacttctcaagcatctgctgaaactcctcctctttctccttatcctcggccagggtggcctcattctgctcggcatatgccatggccaccacggccaggatcagattgatgaggtagaaagagcccaggaagatgatgaccacgaagaagatcatgtaggtcttgccagctgctcgaagggtctgggagtggagggagagggagtggaggggtcccatgacgtccacctcctttgacccagtgcccctttccatacatccattgcccgcatgggtaagcagagcccctccctcacagagcctgggggactgatggccgtcattggcatgctgagccatgttctggggaacttcaaaatatctacttgggactcaaacgtttctggtctcctggctcagaggaggaccgaagccaggcatcctgttatcagagagccaggatagaaaattggtgaacatgggtttggggtcagcttgaattctagctttgccacagtgcctggcacctagtaagaactcaacaaatagtagctattattattatttaatcaatttatttatttatttttagacgtagtctcactctgttgcccaggctggagtgcagcggtgtgatctcggctcactgcaacctccacctcccaggttgaagtgattctccttcctcagtctcctgagtagctgggattacaggtgtttgccaccaaacctggctaatttttgtattttttgtagagatgggtttcgccatgctggccaggctggtctcaaacttctgacctcaagtgatctgcctgcctcggcctcccatagtgctaggattataggcatgagccactgcacccagccagtagctgttattatttttgttattgttatcaacaccatcaatgttagaaacatcacatggcatcagaaggcactgtcactccaggctcagcctgccttccctgcaaacagtagaaggcaaataaagtatgggcaacatcgaatttctgtctttcttttttttcagacggagtctcgctctgtcgcccaggctggagtgcaatggcgtggtctcggctcactgccacctccgcctcccgggttcaagcaattctccctcctcagcctcctgagtagctgggaatataggcccgtgccaccatacccggctaatttttgtatttttagtagagatggggtttcactatgttggccaggctggtctcgaactcctgacctcgtgatccgcccacctctgcctcccaaagtgctgggatttcaggcgtgagccaccgcgcccggcaggcagcattggatttctaagctgccctactggctatcatgaggcctagggggtcctgggcttgtgcctatgctaggtccagaccttggctctgaaagcaaaggtgtggaaagaattaaagctgtggcttggctcggggcaggtgtctagtttcagagagcacaagctcctataagggcactgcgggagtccatgaggagatggcccagttcgggggttggccatcctgtggtaggccccatcaggccctgaagaggctgcagggatggagggggagtggctgtagggttggggggcagggtgggggcagctgtaccagctggaagaggttctcccaatagtcctgtgtcatgaggcggaagagagccaagaaggcccagctgaaggtgtcatagctggtgtagccatagttggggttccgcccggtcttgatgcactcataaccctcagggcagtgcctaggaataggacagggggctgggtttagggtgggaggagcactccagctgggggcagatagggaccccaagggaaaaattccgtcagttctgcctgtgtcccccaaacagaaaagtattccatccatgcccacaggtttccctgcactcccatgccccccaggtcctcatctctaatcagctcccaccttccaagacccctggggtgccttttctgcatcccttagcatcactcacccagcatcactgctgttcccacagagcagggcatcgttggagccctccaggaagtagaagttccctttgggagtcagaggccacaaaggaggcaagtcacccacatggacacagtgtgagcacctgcgcccattgcacacctgtggacaggtctgcgcgtaccacataaaccaaacggatgttccctggctgcctcttccccgtcctttaaggacagctccaagttccaaggtctctgggtagggactcggcagggagctcagcttgagccctgtcagcccagtgcccagtgtggacgaaaagtcatgacgcagcagtggcacagagacggaacgtgtacgtgtgtgcatggggttattgtgtacctatgtagggcccctgagtgaagggtgagtgggggctggaatccaggtgccagggtgagaagggttaccttttcctaatttgcaagaaggcgctatgtagactaacagtggctgtgtgagaatgtgtgtgtttctggcatgtgtgcctgtgaagatgcatatgtgaataggatgtgggtgtgtgggtgggtgatggtgaccctgccaggatgtgagcatgtgaaaatgtggtgtgatgaaggaggacagggggtgcacaggttagggagtaggaactatagactcttgctttgcatagtgagagctttaggatttttttttttttagactgagtttcactcttgttgcccaggctagagtgtaatggcatgatctcggttcactgcaacctctgtctgccaggttcaagcgattctcctgcctcagcctctggagtagctgggattacaggcatgcgtcaccacgcccggctaatttttgtatttttggtagagacggggtttcaccacgttggtcaggctggtctggaactcctgacctcaggtgatctgcctgcctcgccctcccaaagtgctgggattacaggcgtgagccaccgtgcctggcactttagggtttttaaaacagtttgccatttgttgctgcagtaaccctttgaggaaggtattgttatcttgattttataggtgaggattcggagggctggggagatcaagtgactagtcagaggtgacacaggctgccaagtgctagctttaagctcaggtcctcgccatactatttgtctcataagaagtggagacagggcggggagcggtggctcacgcctgtaatcccagcactttaggaggccgaggtgggaagatcacatgaggtcaggagttcgagaccagcctggccaacatgatgtaaccctatctttactaaaaatacaaaaattaattgggcctggtggcacatgcctgtaatcctagctactcgggaggctgaggcaggagaatcgcttgaagccgggaggcggaggttgtagtgagctgagatggcacctttgcactccagcctgggtgacaagagtgagactccatctcaaaaaaaaaaaaaaagaaaatgtggagtcagaggctaccctagggactgggacaggatcccccttgcccgtcaccctccccattcttaccttcatcactgatgtaggcgtcccaatcaaaggtatcgttggtggcccagcttgcatggctgttccacgtgtcgttggcataccatgagtcattgccgtaccacatctcattgccataccatgtgtcattgccgtaccacgtgtcattgctgtaccacgtggtgttggtgtcgttgaacggcgggggccagcgcacacacttctgcctcaggtttcccatgaagagctgcagtcctaccagcgcaaagacgctcaggcagaagacagtgaggatcatcacatccgacagctttttcaccgactggatcagggcccccacgatcgtcttcagccctgaccgcagagagggcaaggatattggcagggggcagggcagggtgataacagagcccccgcggcccccaccgccaagctttttcctactccatcttcaaggcttgacttactgagcaccactacttccccgaagccttctgaaattaactccacccttctctgttcacatcctcaatctggagccctcaaatggccacagacgctcagccactaggagaatgaactataaagacctgatgggctgttgcctgacctatagagcaaacaaaggcatacagcagagcttaatacatgtcactaagttagcgctgtcaaagtgtgttcaacagaacgctaatctcccatgctgtgcccttaaaaagggggcgttgataatgtttgggaaaagctgcgttctagattctgctcttggagagtcattatgtagttgatcctatcaaaggctttgaaaagtcctgcagaaataaacaaaaactttatttgtatttatgtatttatttagagagagtctcattctgtcacccaggctggaatgcagtggcgtgatcttggctcactgcaacctctgcctcctgggttcaagtgattctcctgcctcagcctcccaagtagctgggattacaggtgcatgccaccacacccagctcatttttttggtacttttagtagggatgaggtttcgctatgttggacaggctggtctcgaactcctggcctcaagtaatcagcctgcctcagcctcccaaaatgctgggattacaggcatgagccacctcacctggcctattaaacaaaaactttaatcccacgtatccttaacatatttgaccacagaacccttttccttaaaatgcctagtagcacccgaggaacagcagaagctctagactgaacttgaaacatcattatattctttagacagacaaaggcataaacgatgctgaaataatcccaggggcaggttcccatcacctgtggaagagccgtaacttcttccttgggcctaatcgtagtgcctcttgcgttaatatgacttcatttccttttcttatcctgatatggaaaacaaatgctcggcagcctccttataaaagccctcctgcgccccgaggatgctggcagctggcacagaggaaaggcaatgccgtcttggctcagtggccaatgtacagtgtggaatttgggaagtgcttcctctcctgggtctcacaccttcctcggctgcagtcagagggctttagactagaagatagctcaggtactttctttcttactttcttttcttttcttttcttttttttttgagatagagtctcgctctgtcgcccaggctggagtgcagtggtgtgatctcggctcactgcaacttctgcctcctcgattcaagtgattctcctgctcagcctcccaggtagctgggattacaggcacatgccaccacgcccagctaatttttgtattttgagtagagacggggtttcaccacgttggccaggctggtctcagagtcctgaccccaagtgattcacctgtctcggcctcccaaagtgctgggattacaggtatgggccaccacacctggcctcaggtactttctcatattaggatttaacaattttccctcttcccagagcctgatctctatcctttttctttctctcctttactgggagagaatctccagtttctccacatgctcttttgcaggtctgaatgttcggattctattgatttcatgcttgttgatgcattactttggaattgctctgaccttattgctcagcaggtgcctggtgtgttcctaattgagctctcagagcttggacttttcctcatggagcctttttgtgtctctctcttctctgctctgtctgcttattttattgagcacacacgtgtatatcacaaaccatgggccaggggctgtgagggccttacagatattaaggcatttaatccttacaacaatccaaggagtggtactatgagtctccatatgccacagataaggaaactgagacatggacagggcgaggcacttgcccaaagttaaagttaggaagtggtaaaggtgagaattgaacccaggcagtcaggctccagaatctgtgcttttttcttttgagacagagtcttgttctttttcccaggctggagtgcagtggcaaaattacagctcatagcaggcttgatctcctgggctcaaactatcctcccgccttagcctcccaagtagctgggactataggagagcataaccaggcccagctaatttgttttcttttttttttttgagatggaatctcactgtgttgcctaggctggagtgcagtggcgtgatctcggctgactgccacctctgtttcccaggttcaagtgattctcctgcctcagcctcctgagtagatgggactacaggtgcacaccaccatgccaggctaatttttgtatttttagtagagacagggttttgtcttgttggccaggctggtctcaaactcctgaccttagttgatccacttgccttggcctcccaaagtgctgggattataggcgtgagccaccatgcccagctgagtctgtgctcttaaccaacttgccatgctgcctctcaaacgcccatccttccatgtaggaccccatctgccctctggtcacgtgggcccctgtatgtccaggctttgctgtgagttctacaaaaacaccagcctgggagtgttgtgacactgagtcaggttccaggcctgcacatggtacgggggtctctcagctcaggcagagggtccctgcacctccccagtacctgggatgaccgtgatggttttgagggcccgcagcacccggaaggtcctcagggctgagatgttgcccaagtccacaaactctgtcaggtacctgggtagggggtggaggggggtggggactgtcagagcctggggtgggtggtaggacagaaatcagggctcctccaggcctgggatgaggattcccaagaaattgggggtaccacagggtctggggggcagggcagacacccccaaagctcctctgggagcccaagggttgggaaggacagtgcaggagctctgggggagtggggatggcaaagatagcccggctcacccagcaggtgaggacccatgggtctgtgggtcagggctgcctcatgtgattatcaggagtccatcaggagagtgctgagccagaccctgagaatggcagcttctagaattgtgcagctccccatctgcacaactgaccgatgtcccctgcagccctcagcccaggcagcttccctctttaaggcctggccccctcccctcacccaccccagcctcaggatgtcctggggcccctgctcacgccatcatgatgacactgaagtccagccagttccaggggtcccggaggaatgtgaagtcgtcgacacagaagcctcgggccagtatcttgatgagggactcaaaggtgtagatccctgtgaaggtgtacctgggggggagagggccggccgggacaggcatgtcacctgggtaggggtcagtgtggcaacgacagacccccagaagggagggacacagaaatgaaatatgccactcaggtggctaaggacactagcgagtgatagcatggccaccccagggactcaaggtgtggatgagggtcacaatgacagtgtgtctccctgaaagacaagagcagcaccacacagaggtgcaaacacctgagatgggctgtgtcccagggctggggagctcagggagcagggagacttactccacattcttggaccagggaggcgggtcactcatggtcatgaatacgcagttggtcaagatggtgatcatgatgaacatgctgaacagcgtggggcagggtcaaggaaagtgaggaagcagctaggatgggaggtgatagagggtctcctgggccacagcaccccatctcgcccatccctaacccctcccgcctctcccatcttgggcaggatatgcatggatgagcaccttgatggccccgcgcctgactacgctgaaggggctcagcaggtagagagcaggtgtggcggagaagcggaagatggccttgcccttgttgagtacgatgaaggtctaaggtgggagagaggctgtgagacccagggacagacagacaggcagacagatggatggatggcagacagacagaggaagccttcccaggcccagaccttcttattgctgtagtagggatccaggtcctccagggggatgccgatgacctccggcggggggtctccgtagatcatgggtaggttcttgccagcctccaagtcacttcgtggcttccgttcgggctcctcaatctccatctgcttattccgctgcagccgggcctcctcctccaccgcccgctgttctatggctgccagtgactcccgggtgaaggggcgcaagcactcagggcccagaggcaccagggtgcacagagatggtctggccatcctcgcatcctgggctcagagaccagaagggtggtgggtggcctggggagctgcagtgcgcagccccggggtgctgggcggccgcccctccctgggcgggccgtccactcctcacctcctgcttgcccagtggccgagccggggaggtgggcgtgcagactctatcaggactgggagatgtgcctgcaaggtgctgctgctgcacaggtgctgggcacagagcatcacccctggcccccccaccacactttccccagaagtggcagcggctgccctcaggaccgacggcaaaccaaccagattctttgtggccttgggacttggggtcaacaccccagtgccttcgactgcctcctgggcccaagctccgggaactgtgtggcttcagcctaatgggacagagagagaaccacagctggctgtgctcaggcgacctctggataggccaggatgaggggcctggttggggggttagatcaaagtgggactggcacagggacttcaccctgagggccgacgtggatcctgatattggccacctggagatgtaggtggagaccatgaaggtggcagccaggctctgtgcaaaaaggttgctgtgattgattagtgatgtctgccaggggcgcaaggaggaagaccgtggtgcctctgcctgtgtttgccatccctggcctggagggaagggaaaagaaagatgggggtgggtgtggattcctctttcctgatctttggggtacttggtgttgggctgggagagggaagaagaaagggccctgggcccggcaggggtctcctagcagttccctcccacagccctgggggctctagcccactgggcaggcagggtgaactgggagaggaacattgcatctggagagctgcaggtgctaacgtggaagagaagacgtacagggaaggtcacagggacaaggagatggacaactccaatggtgggggcagggctagagctcctggggactgcttttggctggtggtcccagcacaagctggattgggggaaggggcatccacaaggagcctttgatgcctgtgagcattgtgtggtctgggccccacctggcccctctccccttctgcccagccctccagagcctattcctgtggaagggaagggggatcacttattgcaaatggccctgggggaatgaccacatcagcaggcagttgcagtgagacccctgcagaccagctgcaggcagccactgccagacccacatggacagacctggagccacccctgcaccacagggacctggacagacccctagagacccccaaagccacacctgagggtggacctctcccagtgggccttgacccttgcagcagcgcccctgccctggtcagcacgggcgcttctcaggcttgctcaacaggtggggagggtggccagggagaggccagagccactgggcagagctggccacgcccttgtgcctggctcccagctgctccttacagcacccagggagtcgtgtttccacggggatgactctgcttattcctgccaaccctgccctcagctgctcactggcccctgtcgtgagcgtgggcgtgcatgtgcacacacttgcacacacaggcacatgcacgcacacccggcctggagccaccccacatgcagaccttcccagttgcatctcacagctctgtcatataccttgccaccttcctccccatcacccactccacgtacacccccacatgctgcttgtcactacacagaaggcgccaaccagccagatggccttgaagagaccccagggctgctgtgcacccacccagtctgcagtccctgctgtgatgatcctcctgtcctgatactgctcactcttttcattacacgagcccaagtagggccacaaaagcccacagacacatagtctggctcccaaccccagcactcgaggaaatgactctcacctgagtcaccagagctccccaggggacagatccagtgttttcttccccgctggccctcctgagcttcccacaccgcacaccgcctttcttcttgggagcaggacatcacctgtgcgtccggccactctccccagctctgctctgggacctgccccttccctgcccctggaagatgcttcttctctggggcctgctctgcagcctgttttctttgcacagcgtacacctctcccttcaaaatgttcacttcctcctaatttcctcttctcctactcctccattacccctgaggtctggctgttttgtaatgtgaggggaggaatgtcctcactggttccacttgctgaagctggctttggttggtggctgcccgaagcatcatggtggtagatctggccagttccacaccctactgatgctccctctccagtgtcactgccctctccaccctccacccctcacctgttctgttcaaataacctccccgcgtggtgacatgctcctgtagtcccagctacgaaggcaggaggatcccttaagctcaggagttcgaggctgcagtgagccatgatggtgccactgtcctccagcctgggtgacagagtgagaccctgtctcaaaaaccaaccaaagaaacacctcccaccaggctctcccctagactgccataaatatttgtaaagtcacaaatttcaccccctgcttaaatcttcaatggctttccactgcttaggagtacgtcctaagccctacccagggctcccaaggccctccatgatcagatccctgcctcattgcctacccttcccgcatcctctggccatgctacctccattttcacaaatgggccaagctgttttccacccccctgccctaacccccatgcctttgcttgtggtttgctctcctcccagagcacccatcttctttgtctccctggagagcttccattcatctttctagactcaacccacacaagaaccacctcctccaggaagccctccctgggtaccctggctgggtggaactctccccttgtttgtgtcaccagctcaataaaagtttatcaaatgaataagtgagtgaatcacagggacactctaccttagctcttttctcctttaagcataccctgaacctaaatcataaccagaaaccatatctcctctgaaatcaccacttcaaactcttcctttgcccctgccaccttctcagctcctggctcaggggcccggttgctataatctttgggcactttcagttctttgaccctgcactttctccctttccacctgcttctgacttcatgtccctcctcatctaggcttacttagaagatcatcattctggtccctcctccacagctcccagggagagatcccagaaggagggatctctctccttctatcacacagtcctggggaacccctaactgcatgtccccagctctggttttccaaagtcagccccgagctggagaaatgtggctggggaaatggtatgactaggctgagctcaccgtaaattcatggtcacatattctgggtttgtcctcaatcctgccagccctgtagtgtggatttttctggtaggctcacttttccactttttgaaaacaactatttcatgccttctcctctttcctcagacctccgcgctcctccccatgagcctcccagctgatggtcttccctgaggaaggaagaaccactacacacacactgtcaaatccacagaaccatctccccatcccaccccgtcttcctctatcctgttagaataataataagaagcaagggtcaggctttcctggggctcaggaccccagcccctcttgcttctcaaagacctctccaggtgccctctctctactgcccatccacctctccccatctgtgaacagactctagtgtcccccactttaaaaacaatggcagtggtgacaaaactattctcctggccccacacctccctgcatctattgccctatttttctttcctcttcacagtaaaacttcttggaaagtgtctacaccagctgtcttgacttccttacctttcattctctctccaatccattccaacctggcttccgtttccccttcaactgaaactacttttgtcaagtcactaacaccctccctgctgccaagtccagtgaacacgcttctgtcctcagctcccagagcctctcagaagcatgcagcccagttggccacagcccctttctggaagcacctgattctcacagcctccatggaagctgcttgctgtttcccttccacatccctggctgctccgtatcactttcctctgcttgtcctgatttctgtccccaatctctaatgtttttcagggttcgagctggttcagggtggcatcattcctatgaccataaataatgtcatggggccaggcacggtggctcacgcctgtaatcccagtgctttggaaggccaaagtgggaggatcgtttgagcctaggaattggagaccagtctgggcaacatagtgagaccctgtctccacaaaaaacaaaataattagctgggtgcggtggtgtgtgcctatagtcccagctattcgggaggctgaggcaggaggatcacttgaacccacggaagtggagtctgcagtgagctgtgattgcactactgcactacagcctcggcgatagagcaagaccgtgtctctaaaaatcaataaatacaataaaataataaattaattataaaataataagttcatgaataaaataatagtaatgtcatgggaatgtgataaacgtttcccttgacgtccaggctggtatattcaactgcccccagacggctccaccgggatggctcacaccctcccaactgcaatcagacgtttgcatcttccactgttccacccttcaacccaggaaacggcatcactgctattggctgctcaaataaaaaattaaggtatctccctgaattctcctttttcttcaccttccacaccaagcctgtccaaagttctattaatatcatctcccacatactcctatatttgacatttttccatctccctgggtccataccacaatagtctcttacaatagcctgtttcctgctatctgcttttgcacacacaccctccgaatcagtcccctaaaatagctattgatcttttaaaaacaaaaactagtcatgctgtttctccttttaaaattctccaggctgggcgcggtggctcatgcctgtaatcccagcactttgggaggctgaggcaggtggatcacctgaggtcaggagttcaagacctacctgaccaacatagtgaaaccccgtgtctactaaaaatacaaaaattagccgggcgtggtggcggcacctgtaatcccacctactcaggaggctaaggcaggagaatcacttgaacctgggaggtggaggttgcagtgagccaagatcacaccacggcattccagcctgggtgacagagtgagactctgtctcaaaaaaaaaaaacaaaaacaaaataaaatataataaaataaaattctccagtaatttcttgttgcatgtagagtaaacctaaccttaccatagtggcctctctggcctggtgatcgaacctttcacctttgtctcctgatctgctccctcgtctctctactccagtcccactggcctccttccagctccttgaccactgcgctggctcctgctcttggcctccacccagctcccgttccccccaggtccctctttcctctcccctttcacgtggtttttccttctcatccctctgtgctaagctcaaacgacccctcttccaaggggccttccttctcctttactccccgtcacaggcccctgtattttccttgacatcatatatcataatttgtaatcactggcttatttgccttgtgtatttttctgtcaccctcgctaggctgaaatgccaagagagcagcgactgtatctgtcttggttgccctggccagtcccaacactgtgcacacagtaggcacttaataagtgtctgttgaatgaaggagcgaatggggccttggatacagacctttccagggacacaatggattctgatatgttttgttgattcattcattcatccacccatttattcattctgtttgtgggctggaagctgagctgggcatgagtaggacagaaagctgccacagctgacagtcctgggggaggtggacgtggcacacggtgtccgagacacaaggagaaggtgaggcctgccctcaagaggggagttgactgtgttttgggagtttgagtggatgagggttacttccaagtaggggaaggaaaggtgtggcttttcagttgggcctcaaaggatgagtgagttaggaacacagggaaatggaggggaaggacatcccaggggacaagaagagccagagcaaagacagaggcaggacgcagggaactcactcatgtgtagcacggaagctgtttaggggcttgggggcagggaagatggcagctgggccagggcttgctgaaggcctgagggtctggacttcaacctgcagcctcggagagcccctcacagggcaggtgggctggggtggtgccatcactggcagcatgtgtggtccgctggcccacaatttccgtgtgtctagaatagagagcatgagctgtgttgtttcaacaggcagcagtggaggaatggaaggacgtctgggatgtacgaactgtgacttcctggcagggacaaagcaccaacaaagctcccagagataaggcaggtgatgggctggccatctccatgtgggtccctaggccacaggcaggagtaatgggggccaagatgacggctcccgctctccttccacttgcctccacccctgggttatcccctgagatgtggcagctgagggtctgggggagctccaagcaacctcctcccagtgaatttaagaatgttggagtctgctgggcacggtggttcacgtccgtaatcccagtactttgggaaagcgagggaggaggactgcttgaattcaggagttcaagaccagcttgggcaacatagcaagaccccgaccctactaaaaaatgaaacaaattagccagggatggtagcacgtgcccgtagtctcagctactcgggaggtggggtgggaggatcacttgagctgcagtgagatatgattgtgtcactgcatgccaggctggatgacagagtgagactctgtctcaaaaaaaaaaaaaaaaaaaaagaatgttggagtcacaaggacttgagagcaacattttgcagatggagaaactaaggcccagaggggaccaggacccacccagagctcacatatttattcattcaacaaacattttctgagcacctgctacagtgtgctgggctgtggtctgggtgccagggcagactgcagcagtggcaaagtccctgtcctcactgagcttgcattccagagggagggggcaggcagtaaatagggaagcaaataagataattttagagagtgataaatgagaggctgagccaagactcaaacccagctcctcaggagccagggctggagtccgtttcacaagcaaaaagtcccgtggaacctccattgaaatggacgtttgggcggaagtggtgggcaaattcaggctgtcctgggggcctggaagtgctgagcagacagggatggggtgggggaggaggggttgggaatcagagagccaggctgggtccagctgtctgtgggcagggagccgaggctgaggacgctggagggcgaggcagctcttctctggagtgggtccagccctgcattgtctttctctgtggtgcagccagatcggaacacccaattccagatatagtctgatcacagaggccttttctccctggcctgaacaccctttatgttcattcattccgggatggcatcacttcttccgcagcccaaacaaaggtggggtttgcagtcactcctaggtcttttcctcatgagctgtgatctaattaggtcttccccttcttaggcactgtgcaactgatttttttcttttaaacccatgtgcacctcacaaaatattagcatcttgaatccaacaatgtatgaaaagaattatacaccatgaccaagtggaatttatctcaggtatgccaggcaggtccaacatttgaaaatcagactggaaacattgttttatccctgtaatcccagcactttggaaagctgaggcgggcagattgcttgagcacagttcaataacaacctggacaacatggtgaaacctcaactctacaaaaagtacaaaaggttagctgggtgtactttttgtacatcgtggcgcccacctatagtcgcagctaaccaggaagctgaggtgggaggatcacctgagcccaggaggtcaaggctgcagtgagccgtgatcacaccactgcactccagcctgagtgacagagtgagaccttgtcccaaaaaaaaaaaaaaaatcaattaatgtaatccatcacatcaacaggctaaagaagatcacataattatatcaatagatacagcaaaagcatttgacaaaatgcaactcccattcatgatgaagtctcagcaaactaggagtagagggaaacttcctgaagttaacagagtgtttaccaggaaacctacagctaacattgctttgtttttcttttcttttcttttttttttttttgagacagagtttcattcttgttgcccaggctggaatgcaatggagcaatctcggctgcaacctctgcctcctgggttcaagaaattctcctgcctcagcctcctaagtatctgggattacaggcatgcaccatcatgcctggctaattttgtatttttttttttagtagagaccgggtttcaccatgttggtcaggctggtcttgaactcctgacctcaggtgatccacccacctcggcctcccaaagtgctgggattacaggcatgagccaccacgcctggcctaacattgctcttaatggtgagaaactcaaagctttcccactaagatcatgaacaaggcaaggctgtcccctctcaccacagctttccagcattggacaggaagtcctagctaatgcaataggacaagaaaaggaaataaaaggtattctgactgggaagggagaaataaaactatctttgttcacaaatgatgtgattgtctaagtataaaatcagaataaacacgaaaatttctagtactaatcatgataacagcagggttgcaggatacaaggttaatataaatccaggtgcaagattttacatcttcctttacttaagttccttttgctcattgcacctcttcacctccagtcctctgaaggtcagctggatcttgattttccttcagttcaaggccatccctcacagctaagtgtctctgatcctgtcccaaattattggccaggcaaatctcaggacagatctccctccctatccccattatatccttctagaaccttccctcatgggacaactacacttttggcaagagttcttcaaacatccagaaatccacccagctgaagtgcatcagcctgaaatcccccaagtggtctcagccatgcctctgccagcctggaatataaaagccactgtaggggcctgtcgtggggcagagggagggcaggagggatagcattaggaggtatacctaatgtaaataacgagttaatgggtgcagcacaccaacatggtacatgtatacatatgtaacaaaactgcatgttgtgcacatgtaccctagaacttaaagtataataataaaaaaaagccactgtaaggtactaatatggtttgactctgtgtacccacccaaatctcatcttgtagctcccataattcccacatgttaggagggacccagtgggagataattgaatcatgggggtggatcttttctgtgctgttctcatgatactgaataagtctcatgaaaatctgatggttttaaaaatggaaagtttccctgcacaaggtctctctctctcctttcacctgctgccatccacgtaagatgtgacttgctcctccttgccttccgccatgactgtgaggcctctccagccatgtggaactgtaagtccaataaacctctttcttttgtaaattgcccagtctgggtatgtctttatcaacagcatgaaaactaatacaagtactcttttggaagattgagaatgaatgtaatctgcccctcactgccttccctgttaactccagggcacatccttccagatgcagaggtggcgggttgcttgctggccttgctcaggcaccagccacctcccctcttgccaaccaagcatgctcttcatctctagcaaagctgctagccacccacaaggatctagctgttttctctatggattgggagcaaaatgatccagtgccatctgtggccagtggagaccccacccccacccccaagcttcacctgcagtgggggctcagaattggaacttcctgggagtctgaaacagaccagacttctttttcctggccaaagacagcaccgggcatccgggtggcccacttcccaaattcctgtgttcctgctatggcccagctccaggagtgaaaaatccatccctatgtcccccgggttgtaagtctcaagtcacaacattttctcagctggggcaggctgtgggtggggacgggaagggggtagctgtattgtttctctgccagcgcttggggcctggaaaggaggaagagtggcctgtgccttggcaggcaggggcctagaggaagtcaccccaggtggccctcccctcctggcctgacactctgcagaggaaatctgctctgagagactttggagggaggcctggagccaggagcctcggatggaaacctccagacactcagaggcccagagagttccggaaaccaattggggtgatgtgggggtgggctcctgcgtgaggggtgggctaaagctgattgcattttccatgggggctcactgggtcagaacaagcctccctgttttaagctcctgattcaactggcctaataacttgttctacccaagggataagagtaacagtggtggccatgtttattttgcacctactgtatggttggtttcctattcaggatgcatgggcaggccctcctttcactatcagccccattccctgacaatttccaaaggctctccaagaacactggttagtttttttgtttttgtttgtttgtttctttcgagacaatgtcttactttgtcacccaggctggagtgcagtggcacgaacgatctcggctcattgcaacctctgcctcccgggttcaagcgattctctcagtctcagcctcccaagtagctgggattacaggtgcccacaaccatgcgtggctaatttttgttggccaggctggtcttgaactcctggactcaagtgatccacctgcctcggcctctcaaagtgctgagattacaggcatgagccaccgcaccctgccaactggttagtttttccccaactttcttcctcctctcccaaacctgacccttttcctctacccagagtgcttctagcaggctcagttctgatgaaataaaagcccacaaacatgctggttgggtttcaggcaccgtgcccacttcccactaacttctcccagctcatctgtcggccccagaagccttttctccccagacacaaggttccagagtgggtttctcctcccaagtctgagccttaagttaaaagaatttgttgtaagatgtggaattctgagcttcagtcagcttgggaaagattttccatagcgtgggaggggctggtttctggcccccaaatctccgtgcagtcacctgtagtgctgacgtgcacaggcccatgaggtggaggcttgagaaatatttctagatgaaaagttatcatggacatgttcatttggagcttatcacgtgccaggcactgtcccagggacttcgctttcatcatcctagctaaccagcggtggagccaggtcttgaacgcagctctctctcatgccaagcccctgcgcctgctactacagactcggcctccctccagccccttggggaactcggctgggcatagttgccctccctcagcacggggcccgcccaggttgaggtcccactcagtttgctccctggactggcctgactctcaaccatctatccccttcgaagggcagaccagatccttgggccaagcccctgagaggtgtgggctggggtcggcatctggtaggccctggcagggtcgtgctcaggcctcctggggttttgtgctgggagctgtgtgtgggaggggtcagtggggggaagagaaccacaggtcaatttgcaccaattcaccctcatatatcccctgacccccatatggcctacttagatgcatgcacatgccctcgccagtgtacacacacacacacgcgcgcacacacacacacacacacacacacacactcattgcctctatgagtcatttcccagctgctcaaaagggtggggaggctaatttgttccactcaggcccagggcttcctgccctctgttggcttggatctttcttttacaatcttttctagagatatggtctcactatattgcccaggatgggctcaaactcctgaggtcagttgatcctcctgcctcagcctctcaagtagctgggactgcaggtgtgtaccaccatgcctggcatcagatctttttaaggagcccctgagcatgatggccccccaaactggtgtgtgtacatcctctacacacacatctaagcccacctcccctgcccttagacacatcgcccctgaacatagagccacctcccttcccctccttgctcctcaaagcagtgggtccacggagaggccaccaagaggcctgctcacacctgttcctgggcctggagaactccaggcaacctggctccccattccctccatctgtccccagccatccagggagggtggccttcgagtcctcccgacttgagacaggggagctgggggcacagtcaccagcactagagaagaggcttttcagtaacagcctgaaacctggaggaaggaaaggctgacacccagctcccctgctcccacgaccacgagcacgcccccttcaggagatgcgccctgccgctcgctctgggaaagtcctccactgcagaaagtactccaggggtgtttcctccccagctactctttggagagccttctccaaagctagactgatcacgaacttgccaacctcaaaaaaagctaagtgttgacagcagagcttactgaaaggtgggctggaaggaccttgctctgccgctctggcgtcatggccatcatggccacatctgcaaaccacaggccctcatggaaggggctctgcagtccactttatagaaggaccctcacccagctggacatggtggctcaagcctgtaatcccagcactttgggaggctgaggcaggtggatcactgaaggtcaggagttagagaccagcctggtcaacatggtgaaacctcatctctactaaaaatacaaaaaaaaaaaaaaaaaaaattagctgggtgtggtggcggacatctgtaatcccagctacttgggaggctgagacaggacagtcacttgagcctgcgaggtggaggttgcagcgagccgaggttgcaccactgcactccagcctgggtgacagagtgagactctatctgaaaaaaaaaaaaaaaaaaaaaaaaaaaaaaaaggtccctcacccaagggagaccagatagggaaaaaaagcccatccctgacccccagctccgaagggtgcccagaactgaacaaagccatccttcttgtaactctttctctcttcttttccctgggatgagacattttatgtcagggtcacagactggcaatagccacaataatactgttgaacacgtatgtagagctggttacatgccaagcactgttccaggcacctcacatgtccacgagcacatcaaattctcaccctgatcctgttatcaccccgatttgacagatgaggacactgagggacaggggagataagtaactcaccagatggtatttacatagtaaactgggattggaagcctggccctcagggtttgaaagaaacttgggctcttaatcaggaggtggaccatgaccttcaagcacctatggggtaggtgggggtgcctggtttcacaatccagttcaaaaacaggatgggggccagcaactattggagtttcactctttccttttacgcgagggctcttggcagagggccctgcccgggcactgtggcttccccaccacctctactgtccctgggttccttgagcccccctctctcctccagcagccccatccccccaacaagggctgttgactgaaaactgcagggaataaaaatagctgttgctgatgaggcagaatgggggccagaatgcatgaaaggctggggtgagggtgctgcagggaacctgggatcccccagccccaacgagcaccttccaatggagccacgggggacctggcctgtccctgccacagcagggctggggacccctgccgaagtcaccagaactgctgggagccccacatctgccccagccgtagggctgcccatgagacccactgccctctgccccgaccctgccttgcaccagtcagcttcctccccagggagcgggggccttggcttctgtggacagagccctgtccactcgtgagctgtgcgccccggggaagtgacaggagtcaagggcctgactgtttctataacctgttccctggtccttgacaccctcctccagcgtcccctcccttctcccaagctgctctctgaggcctcagggccagattttccgtttgaagagagcctttccacccctccctgaaggttccaatccttcctgcctctctggttaagcctcctccaggagccttctcagaaccccgcccctgccctgaagatgcactgtccccacccccaccaccatcagatctgtcctcctttctgatggccagagttgcccccaaaaggcagacaccttttcagaaccaccccaacacttgacaaggagttctatgtcttcagcatcaaactcggggcttccctgggcctggcctggggtcatggcagagaccctggcgacgtaagtcagcagagcaggtctcgaccaacactcaggccagcctggagctgaggagaagacccctgaggctgagctcgcaccccatgcaggtttccaaccagaaatgatgagcagggccaggctgggatgggagccacctaggaaggaccctccgttgccttccccaagccccctaaaatcccagcacaattccttgagagatgccagggatggagagggggagggctgctgaggagcccgggggcagggcacatgtggccagggggctgggcaggcccttacccagctcatctttgctcggttgccctgcctgacacaggttccaaggcccttgggtctatttacgtggtcccgcacaggtgatgtggctccaaatgctagcacagtgaccatagctgtccataccactgccacacagagtgaggccactggccacaggcaggggacttggggatggcccagaagaatccggagggtcctggtagaaccagccctccctgcctccaaactacatccccccaactccactcaggccactctgccttctccaccagccacggcccaccccagcagggaggaagggagggggctgtgttctgtgccagccccgacccccggaccccactctccggccctgtgtctcctcctaagaccccccgcccccagaccccttctggtcccccagagtaccctttttgctgtggtcacatatttttcccctcaagctgggctttctggctcccgtccccatgtccccctcgccttcccggcagggctcagcgctcttgacttctctaggaaaagagcccagccgtgccgggtgggctgggggaggggcagggacgtgggcaaagcctgggatgtgtcctctgctggcatctcgcagattcctgttctcagcagagcaaaggagccgccagcaccccccaccccggcctcctgccgcactcctccccccacagccctgcctctgagccatgcaaacaggccaagcaaagtcactgtttcggctccttgctctcctctcctgaagaaactgcagccccgttctgtgtcccttgggtcacccatgcccctccggagccgagccttagcccttgggctgtttgtgaccagaacaaggaaccttgctgagggcaaggacagctcgccaggccggggcagagggaaccgatgacgggacagagagaggcaagtctggggctggagagagggtccaggcaccagaagattcggcagaggctgcgggacagagcagggtcgggccgcagagtgggcaggcggtcagcagtacccagaacaaagtggtgacttccttggagccaggctggggttggggccagagagtcctgcccctcggggtggcctgcccctcggggtacccggcctggggcgggtgtgggggtgcagtactcactattggacgggagcagagcggttgctgacaagcccagagcgccgtgcccacctcaggctggggctggaactctgggggacttggctggggggccgggccggcgaggacagctgctgccgctgatgtcacagggtcatgagtgaaacctgaggactgggccaatcttcaggtgggagcctcagccacagttccctcgccgggtgtactctgggctcagcctgcgaccacttgggctccagcctcactgctccaggagtgacagactcccgggcacacgcacccattcacaagggcacacaaacactcactcactgggacacatgtattagcccacataggtggttcttctcccaacctcgacagtttacacaggctcatctcatactcgaatctccacacttattcccagaagcactcctgaggtacgcgctggcttacactcacacagtcgctggctcactctcacagtcactcgagtgcacactcacggacgcacccacacaaaagctgtgctcccacaggctcagtcatgtgcaaatcacccttcatacgttcacgcagatgcttcctctgctgttacacccgttcacacacatgccgccagctcacacgcacaaacacactcacacccgcgcagcaggcttgtgcacatacacatggcttctagttgtgcccacagtcacattgtgccctgagcaacacaaatgccatattgcacagacacaagactcttactgagtgcctgcctgtgtgtacacacaccacagcacaagcacacacactcacacccacaactacagccacagccacacccactcctacagccacacacacccacacccactccacacacacacacacgcgcacacacagccatgcccctgtgtttatggatttcatgcatgtgacatgctcccattcatgtggagaagtaccactagcatggtcactagatgtgcgccaagcgtatgcccatctatacacccacagccgtaccctcacatcgcacaccagacacacacaagtgcatgcacacccccgcccccagctgtttagctggaccacacagacatatccaggtcccttctccacccccacgcccacccccctggctggacatccgtcccgggctgagggagggctgtgctgggggccaggttgatggaccccacctcctccctccactctggggctctggtgacccctggtggagccgctatgaagtgccccctggctgccagctggagaaacccctggggagttctgtcgcccaaccgttgttctcccaaatccgtcagccttggcagtcccgtgccaccatctttcctggcagcccagagctccggcagctgccctgggccccgagtgagctgagcccaggtcagagcagccttcgacagaagcatagggaggcctggggaggcgctgcccaccccccgtccccacagcagctccgcccagaccctgtggacacagcctcagtccttgccgagcccctcctgggggccaggcctgcccgtggttcaagaagttcctgccaggcccgatgcccatctctgcccagccctcctctgtctgtggcctgtggtccccacggagttgcctcacacccccagagctgttttctaaacctaggtgtgacgctggtgttctctatgcagagaatcctgacttgtgatggttccatttaggatctttctttctttttctttctttctttctttctttctttctttctttctttctttctttctttctttctttcttctttctttctttctttctttttctttctttctttctttccttcttccttccttccttccttccttccttccttccttccttcctttctttctttctttctccttccttccttcctttctttttctttctttcttctttttttttatggagtttcactctttttgcccaggctggagtgccttggtgccatcttggctcactgcaacctctgcctcccaggttcaagtgattctcctgcctcagcctcccaagtagctgggattacaggtgcccaccaccacacccagctaattttgtatttttagtagagatggagtttcaccatgttggccaggctggtctcaaacttctgacctcaggtgatccgcccacctcggcctcccaaaatgctgggattacaggcgtgagccacagtgcctggaccatttaggattttttcaacttcatgatgggtttattgggacagagcccatggtaagtggaggggcacatgcacatggttcttcctctggttctgctcactgaagagacacgcccaaacatgctcgcacccgcagagcgggcttgtgcacacacacacggcttctatatgcgcccagaggcacacttgtgcccccagcaacacaaacgccatattgcacagacacaagactcttaccaagtgcccatgtgtgtacacacaccacagcacaagcccagataccgacaactacagccacacacatacccactcctacccactggagtttcatcgctgatgtaatccaagtgcctgcccagccccacctcttctttgcaagggtctgcttcttctagcgttcggaggaaaagaaaatgttttttcccatttccttctcatgctgtcttcctgaagctgctcctcgggggccctctcattaccctgagccctgctgtggcttcagttcactttgctgctggtcaccatctgggactgctggtcaccaccccgataatcactgggccgctgctccctgtctgtgggcatgggagaagagggggtaggagctgctgtcattcccatttatggctctactccttggtttctgcctctccactgcccaaagctctacagggcaagaccttttttaaagagcaattggactaattgaaggggattaccacatacgagcgggcagggctgctacattcagttgcatgggttgcatactacacaattctgggcaccaagcacatttgaagtcagtgtagattagtataacttaagatgataatgttctgaaagatggcagcaaaacgcctaggggaaggggctaatttttctaatttgcacaaagtgcctttggactagggatgggaatgattggacaaaaaaagctgtatgttaaatatggctttttctccacaacctaaggggaacgaatgcttccctctcttgactccttcctttgggaagtggcttcctctcctactccatccaagtatgtgattctgtggagttgctgcttaaaggatgaccccctcccctaacacacggaagggcatgttacccacctctggccaatcctttgggccatagtggttcatccaaaacctggggacaagactcaagctgaaccaatcctagtccttccctgggagttatgtgtactgagattagaggaaagacaatctctttcgtcttgggagtttctaaatgtgtctgaaggagccatggtgtctccttcacacatgtgtggaggaagcttgtctgtaggaggaggaaacaggaacatcaaacagagaagcagagatgtaggaggggaaggaaggaggaaggaaggaaggaaggaaggaaggaagctggcatccaggctggcaggggcagagtcaggagggaggaaggaaggaaggggaaggaaggtggggaacgaaggaaagaaggaaggagggaaggaaggagggaggaaagaaaggaaagaaggaaagagggagggaatgagggaggaaggtgggaaggagggagggaaggagggaggggagggaaggagggaaggaaggagggagggaagggggagggagggagggtaagggagggaaggaaggaaagaagggaggagggaaggaaggagggaggagggaaggaaggagggagggagggaagaaaggaaagaaggaaggagggagggagggaagggaaggagggagggagggaagaaaggaaagaaggaaggagggagggagggaagggaaggagggagggagggagggaagggaaggtgggagggagggaagggaaggagggagggaagggaaggtgggagggagggaaggggaggagggagggagagaaggagggaaggaaggagggagggagggaagggaaggagggagggagggaaggaggaaaggaaggagggagggagggaaggaaggaggagagagggacctgaagacactgagtctctgaaccagttaaactatagaccaacttcattactgtcctgtcacatgagccaaaaaagcccacccttttctcttaacctagtttaaattgagtttcagttacccacaaacaaaataattctgcaaaacagaaccacatctcagaacctgacacacaggaattggcctggtcacaccccactccaccccaaccccagcctgctcagtcagcttcctccatgagtggtttggttggggtgatttcctgggagctgcatcaggatgctcccccatgggtggtggcaccctgactccgggggctgggaggggaggctctggtactccaccccacagtgcagttccaatggagtgggacctcaaagccaggtccccatcacggggcatcccacctatgcaatgcgctcacttgtaagtcctcagagtacctgcaggtgtctgttggacaaaagcacacccgagtatctcaccaggataaccataatttgcagaaacagtgcagctagagcctctaggcagaaagttgaggtttcttcactgttgaattttcaagattctctctctcctgcatatccagtcaataacataattctgcagagcaatacttagttcctttccttcaactttgatattgcagctccttccaatttgtgtatctttaggaactgcacccaaggaaagggctgatttgctggggtcactctctcaacaatgcttcctcaactgtgccaaaaatagctttgaaatttccacttgaattcttagaaagggcccttttctctccatttccatctgaggaaaagaggaggtagcttattttcacagttccatggtttctaataatggcacaatattcttttgagtgaactgccttaattcactcaaccatccccctattattagacattgggtaatgttcaatttttcctttttctttttttttcgagacagagtctcactgtgtcgcccagtgcaatggcaccatctcagctcagtgcaacctccacctcctgggttcaagcaattctcctgccttagactcccgagtagctgggattacaagtgcccgccaccaagcctggctaatttttgtatttttagtagagacagggtttcatcatgttggccaggctggtctcaaactcctgacctcaaatgacccacctgccacggcctcccagagtgctgcgattacaggcgtgagccaccatgtcctgccaaatgtttaatttttaaccctttaaaaataacactatgatgaacattttttagtataaatcttctcctatgtttagcttattcccagaaatagatttaccaaggcaatggggaggacttttagcacatattgtcttggatcactaaaaaaaaaaaaaaaaaaaaaatctgaaaaacaaaataatccaaagaggccaacaagagttcctattgagaagaaaataaaaaagaaataggtggagtgttcagtgtctcaaagaaaataatagcaggcaagtcaaatagcaggaaagtaagtcatctcctattctgctgcgctgatgtgagatcttctatgagcaaaatagctcaggcagataagtgtgtggctttcctttcttcatggcaaatgcttccgtttcttttgacaaatacatcgaatggaataccataagtcagatagttttgatctcagccttgtttttcaaaacacaagcggttaacatgcccttttacctctgagggattggaatgatcacctcctcctgactgttttctacggccacctctagcccactgcaggcttccttagagggacaagtgtggcagcctctttgctgggccccctgcctccagccttgcttcagttgaatctattgaccattgtacacccaaactcattttcttcaatgtctatttcagtatttcacatctctgaatgcagatgtatcatagagctacttaagtcccttttccaggagttttcagtagcctggaggcagatgtggagcgagtaggaggctgatgtcttcgttgggatcccccaaaagcagaccctgacacaggcttggggagcagtcgtttctttggaaggagatccaaatgagcactacgagagagtggagaagggacagggagaggagaaaaggcagtaaagtgtgtgtttctgagcaggtcactgtgggccacctgggcacaagcccacaggcatcactgagaggctctgtgggagacacctcagagttgtcgcactgagaccaggaggctgcgagtttagctatcaactcccatccattattgcttgtgggctgctcctgtgccaccttctggcctgtcttacctgtggccaggtgtcctcaggtggaggggctgtaggtgagggcaggaaccctctgcagaagactctaggggaggctgcgggtcggccaactctgacagctgctccacagttggatctgtgtgtgtgtgtgtatgtgtattcacacacacacacatgtacatacacacatgtatatgcatatgaattttttttttttttagatggagtctctgttgcccaggctgaagtgcagtggcatgatctcggctcactgcaacctccacctcccaggttcaagcgattctcctgcctcagcctcctgagtgtctgggattgcaggcacccgccaccactcccggctaatttttgtatttttagtagagacagggtttcaccatgttggccaggctggtcccgaactcctgacctcaagtgatctgcctgccttggcctcccaaactgctgggattacaggcgtgagccaccgtgcctggacttatgcatatgatttttaaaacaaaaataagatcttactatgcttactgatatttttgactcaactgtcttggacaacttttcacatcaacagagatattctattcccacattatccatggttgaatagtattctattgggaggatgcatccccatcagacatttgtttgttcgtttgttttagaaactgggtctcaccctgtttcccaggctggagtgcagtgacgtgatcgtagctcacagcatccttgaatccctgggcttgagcgatcctcctgcctcagcctcctgagtagctggcactataggcacaagccaccgcacctgaccccctatcagacatttgttacttctaaatgtggttgacataaacaaaggtggacaagaacaatcttcctgaaacatggctggccacagcacttggtatctcccttttgcttgaaacccactgatagctctccattacccacagggccaagcctaaattccaaaccttggcattccaaaccttggcctgtccctggacctctgctctctgcccagctcctcttctacagtcagacagtttgacccaccgggtcatctcaggtcctgtccattcatacacctgggtcttggcttgggctctgtccccagcctgatagcgcccgtcttcccctgctgcttggccccatcaaggactgacttccttggaactccatccctcagcggtcaagtcctctctttttcattatccccggggcgtagtcttatctttctgctctctttccatggatacattttcacttcccaacaatgctgggacaagtgaccatactgcttatgcctccagggttcagatggcacattgcacacgcagacacttccttggtcaaggtttgttgatgatgagcaaaatggcttgttctctttctacctggaatgagaatggagatggagagaggcatctctgtgttctactcactggggggctgtgaccccagtgcctggatctcagcttgttaatggctgttgaagccataagacccatggggacagtaaagtaatgcccacaagcctgctcccctagagacaggtactacggagcaaaggaggaggtgggaatggtctttctggttcttactccaggactggcaggaaggggagctgacatggagagtgggggaagggctactcggggtgctaagcccagcttcctgtctggattttccttgactgctgccgggggcctatcttaggatggtcacagctgcagaaatagatctcccccttcacctgttcttaagcaaggaagaccttgctaacttcctgtcaaaagaacgcgtgctttggtaacttttccagtacgggagacagtactggggacgcgggtgctgaagtcaccacgattttcctcgtctgaggagcagtggctcaccttggccaggaaacagggcaaatagccgcaaggagagaggcgagaagccggccacgtgtttccagccagagtcctcagcctcttccgtgaattcgggcggtgtttccttccttggtctgctccagaaaccactctttcctggcaggaagcccctctctctgtcagagtgacagggaacagaccctttgtcctcctcactcgtctgccctagcccccagcctgctcctgcaaaagtctctgtttctcctgaacttttcagctgagtcaatcgggctctgggaccccgaaaccaagcctccccagtcactcgcttattcactcaacaaacacaccccccttccccgcactaacccaggcccagttctgggaaccagcaaggggaggggaggggagccccgagcagcgcggcgggaggtggacatgccggggaggagactggcctcctggtggcgggggagggctcctggggaccccaagtccgcggaggaggagacaggagggagcagggagatggaagacccaggagcacgggcgggctccgcgcatgcgtgggaagagaccttggcgtcctcggcgtcgccaaggcaaccggcgccagccatggcctctggggcgggcggaagctggggtcgctccccaccgcagagcgcagtcccgacggtgagggctgagcccgggagcagatcctgccttagcttgggagacggcagagtggggagctgtccctggaggggccagatcctggaggggtgggggacgaggagagacagccccaaaccgagaggaagaggcgtggcagggagcagggaggccgcggggcggggaggagagaacctggcccctgcggggttagggaggccactggccgggggggttggggctcgcgacgtgtccccatccattccccccaccccacctggctgactccgcgcacacccccagccctgggtcaccttcctgcagcccctctcgtgggccgtcccacctgcgcccccgcagccaggccgcgtgaaggaaggtgagactcccgggtccccccaccccacccccaccatcaccaccactcaccctcttctgcctcgcacatcctctgggagtccccgcagcacaacccgccaacccattcttcacccccgggacaggggtgtcagggggagggggactcggaggcccggcgtgggcttgctgaaccccgcttcctagacctgctggaactgatgatgctgcagaacgcgcagatgcaccagctgctgctgagtcgcctggtggctggagcgctgcagccccggcctgcctcgccctgccctcaggtgcgtgtgggtgggccgccggggtcgctcacctgtgggtccagggatgcggatccacctggggttcctgttcaggggggaaaagaactgggagacagaggagcaggaagccagcccgtctctctggctggggctgtttggcatctgtcatgtttcagcctccatgaaaggttggggcggggaagagaccccccaaagtccagaccaccgaggtcttgttttcaaggaggtttccctgtagtgcctcccccactggacttaaggctccaggaaggtaggcaccctggtaaccctgccccatgcatcatgagcgtctggcctggtgcctgacaccgtgtaggggctcagctgatatttgttgaacgagtgaatgaataaatgaatggttagggatacaaagccaggttggctgtgatggcacatggagaggtacaaagcacaagtgcacatagggttgggggatggggacaggctccttggaggagcagaggatcttagaaccagcccttgaaagccaggtaggattttgacccttggaggaggcgaagggtgtgtcccccatccaggctggcaggggcagagtcaggagacagaatgggggaaaccgtgtgcggcagtgtgtgtgtgcaagagtgtgtgtgtgtatgtgtgtgcaagtgggtgtctgtgtgcatgcgtgtgtgtgtgcaaggctgtgtacatgcatatgtgtgtgcaagtgtgtgttcacgtgcgtgtgcaagggtgtgcgtgcacgtgtgtgcgagcgggttgtgaaggcaagtgtgtgcgtgcaagcaagtgtgtgcgtgcaagcaagtgtgtgcaagtgggggtgtgtgcaagcgtgtgtgtgcatgcatgtgcatatagctctaaggctgagccttactcagccaatagtgggcatcctgaggtcaggagaagcagggactgggtggagagagaatgttgttcagctcggaggaggcggagaggggttcaaggaatccagacagaaggagaccctgaggagctactgccacccctcacccctgggtcctcagtgatgacacataggtgggtccaggggccgggggtgaggccggggacagctcagtggactcctggccccagctctgggggtcacacctggaatcaactgggtggccaagttgctcaacgtccttgagctacaggagtaaatgtctccacaatttgttgtccgcatgtagtaaacgctcaataaacacaacccattctttttttcttttcttttctttttcttttttttgagacggagtctctctctgtcacctaggctggagtatagtgatgcaatctcggcacactgcaacttccacctcctgggttcaaacaactctcctgccccagcctcccgagtagctgggaccacaggcgcctgccaccacacccggctacttttttgtgtttttagtagagacggggtttcactatgttagccaggatggtctcgatctcctgaccttgtgatccgtccgcctcagcctcccaaagtgccgggattacaggcatgagccaccgcgccccgcctacacaagccattctttttttttttttccttttttttcttttgagatggagtctcgctctgccgcccaggctggagtgcagtagctcgatctctgctcactgcaagctccgcctcccgggttcacgccattctcctgcctcagcctcctgagtagctgggactacaggcgcccaccaccatgcccagctaatttttttttttttttttttggtatttttagtagagacggggtttcaccgtgttagccaggatggtctcaatctcctgaccttgtgatccgcccgcctcggcctcccacagtgctgggattacaggcgtgagccaccatgcctggccacaagccattcttacaaagcctatctggaggaaataacttaggggaatggaggagtggcggtggggagagcctgatggtagattctcatttcccctccctgttttgcacaatccccaggtctacctggaggttccacaggaagagcctgaggaggaggaggaggagatggacgtgcgggagaaagggcctttggtgtttcaccaccactacttgccctatttgatgccctccccgggtgccctgctgccctggccagcccccttcttccccacccctgcttgtcagccctacttgcaggacgtgcccaggattcagcactgtcctgcctccagggaaagggaggtgtaagtgaggctgggtgctgccagggttctgctctgggctggaagttgcagaagagctgtgcaggggctggtggtcggtggagataacttgtgggtgaaactccagaggccacccctgggcctctgatgggggtctttttctttcccccatctcaggagagctgtgcccccacccccaccccccagtgccacagggactgtgggtgctgatgtacccccggcttcaggtagggctggggtggtgggcagcggggcccaggcctgggagtgaatcaggaggccaggagggccctgtgccctctggtggggtttgggggtttcctaacatcactgctgcaggcaactggcctgtccccttccctttacctctttggggtccactgagacaggagggagtcaagatgaggttcttgtttccccagactactatgatgccgagagcctcctatgaggacagaccccggccctgggaactgcaccagcttcctgctctggatacagccccggagccgcctcctgcacctctcttgtcgactccccggtgcccatggctggcagtccttctcactccctcaacctcagccaggccctcttctcctggggaaatcagtccctgccccacgccaatgagttcctggacgggccggatctgtgctgttgtgtaagagctccctagagcaccacccaggcccttgaagccacgtcagcccgcctctgccccactgcttcctgcctggagcagggggaggcctgggaacagagcccccaccctctctccctcacccctctctctgggatgatgaggtctccttccagcctagtaatggagcaagaggggagggggggattccttctgctttccacagctttgaaggcccctttgaggtggctggaggggcccagagtggtcggggagagactttgctgggcagcgcccctgagcagagtcagttcgctgggccccccacccctcatcccaggaagcagctctgttggcagaaaggagaggtcagagctttgtcctgctgtggccaggagtggcctgaggtctcctggggccaggtgggaacagtgtgtcctctgccccctgggccagggtgtgtttcccccaccctccctcagtagcaatgagctactcgggccagatgggggcctgttgcatgggctgggaggcccctgtgaaggagagggtggggagggaggcatctagggagaggggtcccccatggtggctcccctccctggccattgttatcccaggaggagacactgtgggcacagggctaagtccaggtgtttgtattcgggctagaaaaggcaatgtcccaagtctctgctgcctgtcacagtccttcagccagggctggacctcaaccctgaggagtcacactgagttccagtgaccaccgtggtggtggccatgccactcatggttgctatggccggaaggcctggggcagcctcctccaagccgctcgcaccccgtaggtgcccatccgctgctggcgcaagtgctggccgaagatgaagcagagcaggacagatgtcacgaacagggacagcaacaccgacaccaccgtgactatgatgaccatctggctgtccgacacaggctctggggagggagggggcaagggtcttagacgtcctgtgatcccagttaccagggaccaaaagggagtggaagtccacccccaacccagacccccagaccccgccgcccgctcatgcatccagcagtcaccccagttgcagagatgagtggtgaatggtgtctgcattaaaattattatctggaaaaaaggtggcccagggctcaggctaccagctggacttctgtgtggctgtgagggcagatgtccccttgtcagcagccatgggaccagtgtgtagctgctggacaccgtggcctggagggtggcatggtcccagccaagccccttcttgggcagagctgagtgaacttcatgccaggctccctgtgtgccggccgtccagggtcaccaagcagcagagctctggggacctcagtgggggcagtcaggccaaacttctcattgtggaggggagccaaggccagggagagccgtcaaggtcatggggcttgatggtggccgaggaactagttgacctctcccgacctctggagcagttgaggtccaagctggggacttggaaagaacttcagggaagagggagagtaagagggaagcctcaggatgaagggtgggctcctgggtgtttgcttcccaagtgggactcaagatttttcttcccccgaggggctgaaagtgacttatcactcccaactccatccacggatcccccctcaccatagatctccaacatcttcggggctgagtgtttgtgaaagatgttgccaccgcgagacatcaagtccagcacagccaggcaggagaagttgcggtggccatcctctctgtcagccgtgctgttgaatgtggctgtggcctcctgcggagcaggggctgccttcccgaaggtctcatagtgcagagtctcattgccacggaacaggaagagggtgaggctgtccaggggctccacggtgggcaccctgcactcaatggtgaaggacttgcccacagccaccaaagtgggttgcagtgtcaggatgacctgccttggaggctctgcaggggacaaaggagggaggtctggtcaggatgggggtgcagtcccagcagcctccccctggccagggccatctcctgtcaccatggtgttccacggttggggaggaggtggcctggccggctccagtgcagagaggaagagggcagcagttgaggatggaggctggactgtgtggtagttttacagacatgatggtttccggtgaccaggtgtctacaaggacaaggttcagaaattgtacagccaactggaaagatataaaagtttgggtctgtctcctctccttcagaaatgaaatataaatttcaaacattaaacagttgggtgatcacgttgagagagacttagatgggcattgctcactggaactgggcactggaggaactgagctgtgaagttcatcacttaggaggcagaggccagagccagacctgcccaggttctccagggtcagggccatggccaccacgattcctcacgtattcaaccacccgagggggtgccctggattctcttttgaattagaatacttcacttccactcaccccacctcccaccccgagaaaatatgttggatttaagatgtttttctgttcattgatccactgaaactggtgatggaatggacccaggtgatacccttagcgccaagatgtcctatcccagcccatctggaaggttttcatggctcatgtgcaggtggagtgtgatggccacacatttgctgtgggccctgaggggaagataaaaaccctgggcgacacttcaaccttcttgccatgagatggacaggctcagctcccctgatggtgaccccactacttggcatgggacatggggtgctctggtgactcagctatgttgggaaatgacttctggatttggctaaatgttggttagattgtcctcccctaagcaagactcaaaatgtgggttgtctgcgtcttgagatgccagcgggctcaaggcatccaaccaagggctggcctggtcctgccccttgtcaccccaggagctcagggaggcagggccccacgatgacagtgcccaggagcaggcacagaggggctctgtgtgcattcagtagacacagcctctgtcccaggggagaggagggccccgcagcacagccactcacggtacacgctgacgttggaattcattgactcctgcttcccggagcaggtgaagtggcattggaggaccgtgtcatgggagatgtttgagaccaagtaatgtttccactgagcctgttcgtccagcagaatcttatctagagaggtctccagaccacccacttcaggctggttacaggtggtgctgcagttgacctcgagggaccctttgggctcaaccgccagcttctttggcctcacgtgtacctcgaataccttctcatccgatcctggaaaaccagaaacactgggcagtcgtgtcatccccccaccccctgccctccagtggagctgtccattgaggcagtctggctcctgggtcagggactgaagaggaaaggtcattggggaccccgctgctactttccccttgtcaggtgtcatggccccggctagaccaggaggccaccccccagctggctccctgcctctggctgtccttcctccagccccctagctgacaccctgcctctggctctccttcctccagcccatctgcccatcagctccagattagtcttcctcaggctgtgctccaactccatggagtgggatccgactcagtctttaaggtcagcccaaatgtcccctcccccataaagccctcccacagagggccctctgtagccctccctcccttcctttcttgcacaaacactttttgaacacctgctatgtccaaagcatcaggctctggggatacagcagtgatcacagtagaccaaacactgccctggcggagctccagtaaacagtgacaggcagagcacccagcggtcagatggcaggaaagcgccgagaaagggagcagggagtgggggtgaggccactttaaatactgtgctcaatgaaggcctcacccagatggtgactctgtgggcaaaggcatgcaggggcgtggcacgccctgcagatacttgggggcagtgatccaggggaagggggccagcagtgcaaaggctggggcaggaggattgttgagcccaggagttggaggctgcagtgagctatgatcacaccctgcactccagcctgggcaacagaacaggaacctgcctataataaaaataaaaaatttaaaaagcttcagcaggctgggcatggtggctcatgcctgtaatcccagcactttgggagaccaaggcgggtggatcacttgagtccaggagttcgagaccagcccctgccatctctacaaaaaatacaaaaattagctgggcatggtggctctcacctgtgatcccagctactcaggaggctgaggtgggaggatcacccgagcccagggaggtgcagtgagccatgatcatgccactgtactccagcctgggtgatagaccgagaccctgtcttaaaacaaaacaaaaaaacctaagaacctcagcaacttttgggacttctcttccacctgaagccacagggaacagggcacccccaccctctcggctggcatgtgccaaatcaggaaccccaggaaactggcttacctggacagcagatcagggtgaagagggccacagtcagggtcctgtaaccgaaagaggacatctctggcagtctccacgggctcgcagggaccagccaagggctgcctggagggagatggtgggcgcaggtctgagctatggcccagaatccctagccttctgcaaactgatgactgcatttcctctcattatctgagagatctttgggaagccacgtgcaccagctcgttctaggaccccaggcctctaagaatccaggcagaggaagctgggaagctgctgataagcagggcataacccagtcctccctgctgactccctgtgcaaggggcggggcaggcaatgggtgcacgcatgcgtgtatgagacgtgtgcacaggggagagtcaggcctacaagccccagatctggggaaccccaaatcccatgggatgcattgttggagtcatgcctgggagacaagcatccaaaggccaggacctgtccaggacttgcagttaccatagcaaaaggggacagtgacttgggcttttctaaggaagcctggagggcaatttgagcttctcctgctaaatgcctggtgcaattctgcataaaccttcacatcccactcagttttcttttctttttctttttctttttttttttgagatggagtctcactcttgtcgcccaggctggagtgctgtggcacaatttttggttcactgcaacctctgcctcccagattcaagcaattctcctgcctcagcctccagagtagctgacattacaggatcgcgtcaccacacccagctaattttgtatttttaatagagatggggtttcaccatgttgtctaggctggtcttgaactcctgacctcaggtgatctgcctgccttggcctcccaaagtgctgggattacaggcctgagccaccgcacctggccctcactcagttttcaacctagacttgatcttgactcagctgattcagggccaacttgaggcccagagcctcaggaaatgcatcccataatagtccccagcaacccaggcacagacagagaatggggtcagtctggctgcagccacacccccaaaccatggccttcatttcctggcctacctgatgtcctccatcctctctctccctccaggagggagccttgggttgggagggttggagcctgaggtgtttcactttattcctagggaggaatccgcagaagcagtgagcaggtaagggagggatttcaatggacgagaggaccttcctgggggatcgccacacagtctcatccctcagttctgcctaagatcccttttgcaaccaggcagggaaagagcaggacttcttgctttctcaggggaacccctgatggggcctttccaaagggatgccccagaatcctcaggactttggccaagctccattccgggttgggagggcagggtgaggtcctgcccttccctcactgctgagggcaaaggcggttactactgtacacaaccatcaagggctgccattgtcagcctggacccagggaagtccctggacggggttgctggacttgggaatgatgcagggaggaagaggcagggcctggggccagcagagaaaaggagaacagggtggagtttcacccccagcctgaaggaatctgatttcatgtggggccagcaaagtcctgagagcaggaaacactcctgaaacccaagccaggggctgggacagaagggtggggatggggacattgctgtagtggagactctgtgtcctccactgagtcagaataataataacaataacaacatcaataataataatagtaaacatttacttactacaagtcgggcactgtcacaagcactctataaatattaaccaattaatcccctaactctctgaggcaggtactgttactgtctccatctcacagatgggaaaactgaggcacgtcaaggttaaatgacttgttcaagatcacatacctagaaaaaatgaagtcaccatgaatgatagcctgccatggtgactgttgaagcccgcccgagcaggcgcaagaagaggattgttaggagcctggttcccaggagaccctcaagagggaaaagcaacatagcagaaggccagaggaaggttctggggcctgcctcactgtgagggactgtgggaaggtggggtgatccatgcctggagtgctccaaacagcttctggaagggacagtgcttgggaatcccacctgcatacacagcagggccagcctgattccctcttcaagcaaggcttctgcagcccaacgtcctccccgaaagcacaggccccagttcctaccccccatctcctcctgtgatgtctcccatccttcctgggcaggccctgcttggctgggacacaccgggcatgtgaccatctatttgttagaaatagttactgtattctaaccgttgacacatcaaccttcctgcctccccactggcccatcaacagtgagggcagaagctgaatctcatgtactgctacatccacccagtgtaggacactgcctggcacacagtaggtgcttcatcattgttgaattggtagatggatgggtgcatgcatggattagtgaatgaatgagagagtttgtcctaaacaagcctgggcgaaggctgtttttagttttaggtcctaagcatttactgttttttttttttttgtccagcatcttcctcctgctactgctaaagtctctgcttcccaagtccacaaggctgaccttataatgtaaacaaggccaatcatggtaccttactccttgaggatgggcactttgagttaggcctgcacaaaggttttctttttttgagatggagtctcgctctgtcacccaggctggagtgcagtgatgcaatctcagctcactgcaacgtccgcctcctgggttcaagtgattctcctgcctcagcctcctgagtagctaggattacaggtgcccaccaccttgcatacagagagttactgtggggcttgccctacaaaatgtccacgacaggaaaagagcttgcagcacactcaacattaatcattaggtcagcatgctctcgacctgcttcctcatagttgctcggtgcctattgccccagaattatgcagactctgtcataggattagagttcccttaactgctctaaaggtaacagcttgaacattataaaatgttaagttttccctttgagatattctttcaggtcctgcataccagtgaaagtactcatgcaggctggtctgaaggaccccactgatgccagccagtctgcaggacccaattgatgccagctggcctgaaggaccccaagaggagctgactcacaaaagaatgcagtttccatattccagtgattttatccccttacctcgaccagtcattgaccccagtttaccagcctcttgccctccacaatgtcctctaaaatcccagcccagaactctttggggagatggatttgacggtctccccgatctcctcatttggcaccccgggatcattaaactttttctctgcaggaaaccctgctgtgtcagtgtaattggcctgttgctgcacagcagtgggcctacacacctgttggtcctgtaacacaggaataagaggaaactgaccatgatgtagaagagagaagaaactcggggtccttcctggaaaattgttttcaccatgaaatgtctcctgttttgctctctggatccctaagtttctcaaggaagggggctataaaactggaggagttaagatagttctggaaaacgtgagagaatttttgaggggaggggagattagagtctcagtttagaaagtgaactcatctctcccacagagctttggaaggattatgctctgacagggtcctaatccagtgactttcctctcttgtttgaaagaaaaaaaaaaaaaactattagaattgtgtacccagcaaaaccatctttcaagaaccaaagttaacaaaaacagataaacaaaaagtttatcccccaaaatacctaaatgagcatttacaaatgtgcttcagtaagaagaaaaaatgattacagaacagtttgctatgcaaagaagggcaagaaaataaaatggcaaatgagtacacaactccaaacaaatattgtttacaataatggtaatattaatcattataatgtttattttgagaagttttagaagttcaaaactaaaatactgggtaagaatatataaggaaggattggagttaaagcattctaaggttctaacttggaatttttaggagggaggacacattttaagttatataaggaatgggagaaaatatttgcaagccatacatgcagtaaggggctaatatccaaaatatataagaaactcaaacaactcaatagcaagaaaaaaaaacacaattttaaaatgggcacagaccagcccaatgtctcttggactttatttaatgccatataatgttgtcagaataaagagaaagatgaaaaaaataaacaaaaatgggcaaaggacctgagcagacatttctcaaaagaagacatacaaatgggccaggcgtggtggcttacacccataatcccagcactttggaaggccgaggtgggtggatcatgaagtcaggagatggagaccatcctggctaacacggtgaaaccctgtctctactaaaaacacaaaaaagtagctgggcgtagtggcacacgcctgtagtctcagctcctcgggaggctgaggcaggagaattgcttgaacctgggaggcagaggttgcggtgagccgagatcgcgccactgcacttcagcctgggtgacagagcgagactccatctcaaaaaaagaggacatacaaatggccaagaggtatattaaggagtgcccaccatcactaattattaaggaaatgcaaattaaacccacaatgagatatcacttcacacctgttagaatggctattttcaaaaagacaagagataagtgttgatgacagctgggcatgatggctcatgtctgtaatcctaatactttgggaggctgaggcaggaggatcccttgaacccaggagtttgagatcagcctgggcaacacagggagaccctgtctctaaaaaaacaataataatactttttaaaaagagatacgtgttgatgagaatgtagagaaaaaggaatgcttacatgcagttaggaagaatgtgaattagtacagctgttatggaaaatagaatggaggctcctcaaaaaattaaaagtagaactacagaggatctagcaatcccactactgggtatatatccaaatgaaatgaaaccagcatgtcaaagagatatctgcactcccatgttcattgcagcattattcacaatagacaagatatagaatcaaactaagtgcccaacagtggatgaatggataaagaaaatctgatacatatatacagtggaatactattcagccttaaaaagaaggaaatcctgtcatttttgacaacacgaacaaacctggaggacaatatgttaagtgaaataagacaggcatagaaaggcaaatactggccaggtatggtggctcacacttgtaatcccagcactttgggaggttgaggcaggaggattgattgaacccaggagtttgaaaccagcctggacaacatagtgagaccctgtgtctattattttaaaaattttaggctgggcaaggtggctcatgcctgtaatcccagcactttgggaggctgaggcgggtggatcacttgaggtcaggagttcgagaccagcctggacaacatggtggaaccccatttctactaaatatatataaaaattggccgggcatagtggtgtgtatctgtaatcctagctactcgggtggctgaagcaggagaattgcttgaacccgggaggtggaggttgctgtgagctgagattgtgccactgcactccagcttgggtaacacagcaaaattctgtttcaaaagaaaaaaaaattattaaaatgtttacacaacatttaaaaaggcaaaacttgggtttgctgcacaccaagtactgttgaatccacgtgaatgaagggatgtggaacactgtattagatgttctaaataatctagaggtagtttaaagtatacaggaggatgtgtgtaggttatacgaaaatgctatgcaattttatattagggacttgagcatcctcaaattttggtatctgttgggagggttctgaaaccaatccctccatgtatactgaatagtgactctacaatttttgtcaaatattaaaagaacatgtaaaatttcaaggaaaaccagtagagataaagtatataaattctaaaccactagagaggcttaaaattgtataaaaacaatccaaacaatccttagttaaaaaaaattaagaagaaagctgagtgtggtggcttatgctggtaatcccagcactttgggaggctggggcgagtggattacctgaggtcaggagttcgagaccagcgtggccaacatggtgaaaccactctctactaaaaatacaaaaattagctggacatggtggcgtgtgcctgtggtctcagctactcaggaggctgaggcatgagaattgcctgaacatgggaggcagagcttgcagtgagttgagatcgcaccactgcactctagcctgggcaacagagtctcactctgtctcaagaaataaaaaaatacaaaaacaaatacaaatacaaaaattagccaggtgtggtgatgtgtgcctgtagtctcagctacttgggaggctgaggtgggaggattgtttgaacccaggaggtggaggttgcagtgagccaagatcgtgccactgcactccagcctgggtgatagggtgagttcctatctcaaaaaagaaaaaaaaaatactaaaacacaaagctcagctctatgttgtttgttgtttacaagagacatacttcatgcataaggatatggaattggttgaaagtcaaaggatgaaaaagatatactaggcaaacaccaaaagaaagcttggaaagctatatttatatcagacaaaaatgaatttaaagacaaaaacatttattagggatagagtgagtacctagaataaagggtcaattcaccaggaagttacaatagttctaaacttctatatagaagtttctatatagaactatatacttctatatatactctttatagttctatatactcccatatagaactataaagaggtaaaaccaccatcacaacaggaaattttaacatatgtctcttacttatgagtaatgatgcggacagaaaaaaaaatcagtggtgtaaatgcttgaactgcatctataaagtagagaatacaaattcttcaagaagatgagttttaaaacgcttatatatttgacagtttaaaaacataatctaatgcattggtcaaagaagaaatcataatgacacatttataaattcctaaaattgaatgataatgaaaatatcatgttaaaatttctgcgaggcgcaaaagttgtgcttggagggaaatctatagcctagaatgcttgtattagaaaagaactctgggccagatgcagtggctcatgcctgtaattccagcactttgggaggccaaggcaggaggattgcccctgcccaggaatttgagacaggcctgggcaacatggtaagatcacatctgaaagaaggaaggaaggaaggaaggaaagaaagaaagaaagaaagaaagaaagaaagaaagaaagaaagaaaggaaggaaggaaggaaggaaggaaggaagagaaagagaaagaaaggaaggaaggaaggaagagagagagagagaaggagagagagaggggaaggaaggaaggaagaaagaaagaaaggaaggaaggaagggagagagagagaaagaaagaaagagagagagaaaggaaggaaggaagaaagaaagagagagagaaaggaaggaaggaaggaagaaagaaagaaagggagggagggagggagagagagagaaagaaagaaagagagagagagaaagaaaggaagaaagagagaaagaaagaaaggaaggaaggaaggaaggaaggaaggaaggaaggaaggaaggaagaaagaaagaaagaaagaaagaaagaaagaaagaaagaaagaaaaagaaagaaggaaaataagtctgatggccaggcatggtgactcatgcctataatcctagcactttgggaggccaaggcggaaggatcacctgagctcaggggtttgagaccagcctgggcaacatagtgcgatattatctctctattaaaataaaaaatattacaaaaaaacccttccctacaaaactcaataggataggcaagtctccagtgaaatcgatatataaagaaaaagaaggcatgcgtaaacatgattaggaatgtaaatggaaacgtaaacatgagaagaaagaaaactatacaaatttatagaaacagaaagtgaaacagtagttgccaggggctgtgggagaggggaaatgagagtcctttaaatggatttagttctggttttgcaagatggaaaaatttctggagatgggttgcaaaacaatgagaacatacttagcattaattgctgaagtgtacacttaaaaatggttaatttggtacattttatgttatgtgtattttaccacaatgaaaaataaagaagactataaaaaagttatgctacaacataggaattgaagtagatcaagtcttagacaaatataacttaccaaacttatttaagaagaaataaaaagcctaaatggttctataactattaaagaaattgaatcagggccgggcatagtggctcacaggtaattccaagaaagtgcttacggctaatcccagcactttggaaggctgaggtgggaagatcccttaagcccaagagtttgagaccagcatgggcaacatgacaaaaccccatctctacaaaaaatacaaaaactagccaggcgtggtggtgcacgcctgtagtcacaactacttgggaggtggagttagggggatggcttgagcctgggaggttgaggctgcagtaaaccgagattacgccactgtactctagcctaggtaacaaagtgagaccatgtctccaagaaaaaaataaaagaaaacaaaaaaacttgaatccgtaatttaaagatcttcccatgaagaaaataccaggtctagatggttttgcagaagttcaagtaagggtaactctttaaaaaaaattattattattattttttttagaaatggagttttgctgtattgcccaggctagtctcaaactcttgggctcaagagatcttcctgccttagtctcttgagtaactgggactataggcatacagcactgtgcctggttagtaattctaattttataaaaactctctctgagaatggaaaaaatgaaaacattaactctttccatgaggccagtgtaaccttaatatctaaacaagacaagtacaggaagagaaagcaatattagaggccagtttcactcatgactataaatgcaacagttataagaaaaatactggtaaatcaaatccggcagtgtaaaaaccaaaaggcatcacattctagttgggtttatctcaggtttgcaaggatggtttaacaacgaagaaatgtctataaacattatttattatgttggtaatagtagactttggtgctctgtgtcatatcacttctgccctctgctgatttcagctgtccctacagtggatgattttgtgcaagcctagactcccttttaagctgccagtgcccctccacctacccccaaacttatactatgcttctttttgcttttcgtctcagggtcttcttcaatgctttaggaacaatttacttgccagctagtgattcccagaagtgtgggagagttaaggtccctagaatgcgatccttacccagttggggaacaggagccagtggatatactttccagcctccttcttgccagtgggcaattctgagagacatcctgtagttttatcagaggtctcagcagaataagcttccgtcgcctacagctgcaacatcagtcaccctcctttaaatgggcttttccttccttcctgtctgttttccctgctccttcaccccctgcttcctggaatcacctctcaaataacctatctgaatctaagtccttgctccagcctctgctttggaacaaaggattctgctttagagcaaaaggagaccaaactaaaacttacattaacagatttaaaaagaaaaaacatacgataatatcaacagattaaaaaaattgacaacattcaacacccttttatgatacaagctcttagcaaattagaagcaaatgtccttaacctgataaagaaaacttacataaaacttctatgttgtttttaatgagtaaatcttaggagaatttcctttaaaatcaggaagagacaaagatgcctatgatttctgcctctgtttaatattgtaccaaaggtcttacacattgcagtaaaaggaaaggaaggaaggaaggaaaggcgatcaaaaccatcggtatttgtatatggcgtgactacccaggtagaaaatccaaaagaatcatcaggcaagtgactcaaagtaataagagattttagcaaggcaactagctaaaagatcaatattcaaaaattggttgttcttgtgtgtatcagtaacatacaaaaacataatttaaaaaatacatcaattataacagtcaaaaaagtagagcaagaaaactaacaaaacctagaactataagacctatagtaagaaaattataatactttattgaaaaatattaaagacaatctaaataaatggagagataacacatgttcatggataggaaattcaatattataaagatgtaaattattctgtaactgatctatagggtcagtgcaattccaattaaccccagtagggtttttcatggaaactgaaagctgattttaaggtttatatggaagaacaaaagaaccaagacgcccctaaaggaaatgaataaggtgagggatttgctctgctagatattaagactttctgtaaaatatggtgttagcgtaggtataggcaaattaactgatgaaacagaataaagagcccagaaatacacctatgcttgtttgaaactttgatgcatgacaaagatgacatagaagatcactgggtaagagaagagcctgttaaatgacacaggatcaattgattaaccatatagagaaaaaaaggggaaaatgtatccctatctcacaccaaatatagaaatcaattccatttagattaaggatttatatgtgaaagaaactctttataagaaaatgtaggagagtatttccatatccttggggcaagacctcgaaattgtcaatcataaaatcaacaattggtatctttgactaagatacaaagaaacaggtcgggtgcggctgtgacgccagcactttgggaggccgaggcgggctgatcacgcggtcagaagatcgagaccatcctggccaacatggtgaaaccccatcgctactgaaaatacaaaaaaattagccaggcatggtggcgggcacctgtagtcccagctactcgggaggctgaggcaggagaatggcgtgaacctaggaggcggagcttgcagtgagctgagatcgcgacactgcattccagcctgggtgacagagtgagactctatctcaaaaaaaaaaaaaaaaaaaaaaaagacacaaagaaacatttcaaagaaaaggaaacatgtctaaacaagtgaaaagattatttagctcgagtagccagggaaattaaaattaaaattacaatgggaccgatactattttatatgtattaggttggcaaaagttaagaaatatgacaagaccaattgttggagaggccgtaggttaataggcacccttctaactgctgatgagagtgtatattggtgctctcagagataattaggcattatcttgtaaacggaatattcttataccctgtaactcacagttccattcttagatgtatgccctagaaacgctgtcacactaagaaccagacatgtctttgtgtttacttctcttttttttttttttttttttttttttgagacggggtctcgttgtgtcgcccaggctggagtgcagtggcgcgatcttggcttactgcaacctccacctcccgggttcgagctattctcctgcctcagtctcccgaatagctgaaactacaggcgtacgccaccacacccagctaatttttgtatttttagtagagatggggtttcatcttgttggccaggaccgtctctatctcttgacctcatgatcctcctgccttggcctcccaaagtgctgggattacaggcatgagccactgctcccggccttacttctcactatctgtgtgaccttgagcaaatcacttaatctttctgtgcctcaatttcctcatctgcaaaaaggaatcaataatagtatcttcctcatagggtttttgtgcagattaaacaaataaaataagtaaatattttaaagcatttagaacagtgcctagcacacagtaacgctatataactgtttcataaaataaaaataaataggcatagccaggtgcagcagttcaagactgtagtcccaactaatcaggaggctgaggtgggaagatcactggatcccaggagttcgaggttgtagtgtgctatgatcatgcctgtgaatagccactgcactccagcctgggaaatatagtgtgaccccatctcagtaaataaataaataaataaataaatagagatgcatatgtaataaagcacttaaaaataagagaacaataaacacaaaattccagagggtggctacctgtgggtgggaggcaagtagcataaaagtggacaagtggtggccaggtgtggtggctcacgcctgtaatcccagcattttgggaggccgaggtgggcggatcatgaggtcaagagatcgagactctcctggccaacatagtgaaaccctgtcgctaccaaaaacacaaaaattagctgggcatggtggcatgcgcacctgtagtcccagctacttgggaggctgagacaagagaatcgcttgaacccagcaggcgaaggttgtggtgagccaagattgtgccactgcactccagcctgggcgacaagaatgaaaactctgtctcaaaaaaaaaaaaaaaaaaaaaaagcagataagtggtgtttgcagtttggtgatactccatccttgtgctgagtggcagcttcaggtgtgtttggtatattactgtgcagtatgatgtatatgtatgttacataagctttttatgcgttacctagtaaattttacaaaaataataaaagggaaaaagggcctttctacgtgcctagaaagaagaggcttcatgggaatgtgagccatgggttaggaaagaccccctcgaaccgaggcaggtaggaagtgagtgactgagattcattatgaacccaccacgcctgccggggagaacagggactgtcccttcccctctgcatcagctcagatggtccagatcacagcccacgtgggcccctaaataaggaggcagccccacatttctacatcggccaccgagatggcagagcagaggaaggagagaggggagacaaatcaggaaaggagcgccagggcaagtgcgtgagctcagagacccagcagggcagggcaggagcttcacagagtgcagaatgtcgagccacaggagcgctggggattccccaacccctgcacttaccagcgagaaactgagacccagagaggggaacggactaaaactcagacctcgacactgccaaaatccttcccatgctgccacgcttcattggagggaaagtgagaagctcaaccttacccctgtgggctccaagaagggtagctctgggatcccgggcaggaaattggtgacaaggtgacaaggtgcgcgtgtcacagctgcccagttcacggcttattcagtcttctccctccccccactccccaccagaagtgacgtgcttcctgtgccccggttcccaccctaaactagcctcatttagctccactcccattccgctttttttttttttaattgtggtaaaacgtacacaacagaatttaccatttcaattttttttttttttttagactgagtctcagtcacccaggctggagtgcagtggtgtgatctcggctcactgcaacctctgcctcccgagttcacgtgattcttgtgcctcagcccgcagagtaaccgggaccacaggcacctgccaccacgcctggctaatttttgtatttttagtagagacagggtttcaccatgttggccaggctggtctcgaactcctgacctcaagtgaactgccttcctcggcctcctaaagtgctaggattacaggcaagagccactgcgtccagccaattttttgttgtgttgtttttaagacagagtcttgcttttgtcacctaggctggagtgcagtggcacaatcacagttcgtggcaacctctgacccctgagctcaagtgaccctccctcctcaacttcccaagtgactgggactacaagtgtgcagccaccaggcttggctaatttctgtagtttttgtagagacagagtgttgcttatgttgcccagcctggtctcaaactcttgagctcaagcaatcctcccacctcagcctcccaaatgctgggaatgagccaccgtgctaggcccattttaattatgtttaagtgtacagtttggggcactaagtacattcacattgttctgcaaccatcaccaccatccatctctggagctctctctttctcttttctttctttttttttttttgagatggagtttcgctctgttgcccaggctggagtgcagtggtgtgatcttggctcactgtaacctctgcctcccaggttcaaacgattctcttgcctcagtgtttttgttgttgttgttgttgtttgtttgtttgtttgttttgtagagatggagcctcactctgtcgcccaggctggagtgctggagtgcagtggtgtgatctcggctcactgcaacctccgcctcccgagttcaagcaattctcctgcctcagcctcctgagtagctgggactacaggtgcacgccaccacgcctggttaatttcttttgtattttagcagagatggggtttcaccatgttgcctaggctggtctcaaactcttgagctcaggcaatccgcccgccttggcctcccaaagtgttgggattacaggcatgagccaccgtgcctggccttgcctcagcctcttgagtagctgggattacaggcacgtgccgactggctaatttttgtatttttagtagagatggggtttcatcatgtcggccaggctggtctcgaactcctgacctcaaatgatccgcccacctcagcctcccaaagtgctggtattacaggcatgaaccaccacgcttggccagaactgccttccttttgaaggctgagcaatatcctattgtgcgtgtgtgccgcattctgttcatgcattcatatactgatggacacctgtgttgcttccacctttggctattgtgaatagtgctgctacaaacagggttgtacaaatacctgctcaagactctgctttcagttctctggggtatgtacccagaagtggaaatgctggatcataatggtaaaatatacacaacaaaatctaccatcttaaccttttttcttttttttttttagtggtaattctgactgggcttggtggctcacacttgtaaatccggcactttgggaggctgaggtgggaggattgcttgagtctaggacttcaagaccagcctgggtgacaaagtgagaccccatcgctacaaaaaaaaaaaaaagtaattttgtttaatttttgaagatttgccatcctgttttccttactcctccctttgatgtgcagtttctgtactcactggggccttctgtgaatgaggcagttccaggacaagctaccttctggtcccccaagtgaggcaggcgaagatcacagagctgaggcttccttggctgtgacacaccattccaaaaaagcctcttattagtgactaagacctatcacttcatcaaatcttatcagacctgccaccttgcctagcaattttacaacaattactctagaagagtgactttgtacaaacaagcagaaagtatgaacactgggtgcagaggtgggtggcgggcagccagctaggctcacccacgagcagaggatcttgctcccacgggccagcctcacagcacattgaaacttctggcttagcaaagtcacaaattagaccattcagaggccaggaggacagtcaaggccacacattgctctggcgcaatttctcttggtgcttgtgtgcatcaatttcttcagctcagttctttttggaatctccttgtcatactgctggcaaaacagagccaatataaaatgactatggtgggaaggaggcagcagggcccagagctttgaagggcccacgtgactttaatgttttggtggcatctgtcatagacacaaatgggggtggatgtcccatttgggacaatttctccaggagccatgtttggactcacccttttttaaagataaccccttctttttctactttagacaagttttttgggaagcttccatcttcctactcagctccaccttcctggtcaaatgattggtccaaggttggcatcatggtacctcaccttctggctctttcttttttttatcctttttttttcctttctttttgagacagagtcttgctctatcgcccaggctggaggacagtgatggtgtgatctcagctcactgcaacctctgcctcccaggttcaagggattctcctgcctcaacctcctgagtagatgggattacaggcatctgccaccatgtccacctaatttttgtatttttagtagagacggggtttcaccatattggccaggctggtcttgaactcttgacctcaagtgatctgcctgcctcggccttccaaagtgctgggattacaggagtgagccactgtgcctggccagaactgccttccttttgaaggctgagtaatattttattgtgcgtgtgtgctgcattctgttcatccattcatatattgagggacacctgtgttgcttccacctttggctattgtgaatagtgctgctatcaacagggttgtacaaatacctgatcgagactctgctttcaattctctggggcatgtacccagaagtggaaatgctggatcatactggtaaaatatacacaacaaaatttaccatcttaaccttttttctttttttcagtggtaattctggctgaggtgagtggctcacacctgtaaatccagcactttgggaggctgagatgggagaattgcttgagcctaggacttcaagaccagtctgggtgacaaagtgagaccccgtttctacaaaaaaaaaaaattaaaaaggtaattttgtttaatttttgaggattcaccatcttgttttccttactcctccctttgatgtgcagtttctgtactcaatggggtcttctgtgaatgaggcagttccaagacaagctgccttctggtcccccaagtgaggcaggcgaagatcacagagctgagccttcgctggctgtgacacgccactccacaaaagcctcttattagcgactaagagccattacgtcatcaaatcttatcagacctgccaccttgcctagcaattttacaacaattactctagaagaatgactttgtacaaacaagcagaaagtatgaacgctggccatctatgcaagttttaacaatccaggtgctagatccacccagaacttgcagattaccctgtgtacccacttcgtgagctgcacacacagtcctgctgttctgttgtgtagccagagttgagacccctttacgtacttcctcaggcaacatttgggccaaatcccactctggaaacctcctccctcaactttgtggcctctgagcagatcactttccatttccatttatttctttttcttctttgcttggtttctggcacattcctctttgaactgccaagatcatgctaggtaaatgtttattgaatgtaagctagcagcttggttttaggagacacatattttatagcaaggggtttcaaacttgaacgtgtgtcaggatcactggggggcttgccgcaacagcccaccgggccccatccctagagttcctgagtagtaggtctggagggaggcctgagaattttttgcatttctaacaggttcccaggtaatgacgctgctgctggcatcagtatcacccgggaacttcttagaaatgaggaccacactgtttcagcggaatacgaaagtgttctcaattcacatagcgtccagctaatcaaaaccacaagtagaaactagaggtgtcaccagcctatagactgactaacagagactgtgagctcagtctggcagagtggaattataaggctgtgtgaccttgagcaagttgtgtaacctctctgaccttcagtttgcttatctgcaaaatgggataataataatagccaacgtttgtgacatgcttactacatatgccacacactgttctaagcactccacagtaagtatcatcacatttcatcctcataacaagcctatgactcgatactgttgttatgcctcttacagatgaagaacgtgagacatggtacagtagatggcgggcagtagctggcacacagccagcaagaggctgaaccaagattccaatccaggcagttgggacccaacgtctgagctttcatactagggagcccctctcacccccttcagaccccccctcaagggcttctgagaggaaagtgtgatgatttgtaaaacgctggctgatagcctggtacacggaagcactcaacaaagtttgtggttattgtgagttggtgcccggacgtgcacctatctgtgtccttgtaggctgtgcccaaggacatcccagcacgtgtgttgactattgcacagatccacagaatatcagaccccaaaatcatgcccgttggacaggagggggctgtccatattatgtaatgtgttaattcttgggtccttggatgggacaaggttgtgaatatgcatcacttagaaaacttatcagcgagcgaggaatggagttgtttacaaaaccaagcccttgacgtcttcctggacctcaacctcatctcatcagctccccctacggagtggggcggaggcggcggaaacgctgaacgctcagggtcgacaggagcaggggctgcactgcccgccacctagtggccaaagtgagcaggtcccctaaaagacacgacgccccgcgatctgcggtaaatcacattccttgcgattctgcaatcacaggtagatttggaatgggctaggatcccctgagagactgtttataaggagggcggtctatgtagatgcactaatttgagggagggagagcgtgggagggtctctgcggaggagagatgctttctctctggaaaccctggacgtgaaggcacctgccagctgccatttttcttgctctaagcttttctgcaaaggagggaataaaactgagatgctttactaggaactcaggtgggaaaataaacagtttccttaggaaagatgccagaggcagggagcagaggcaaaatccaagagagagatgaggttgttttttgtttttgtttttgttcgttttaaatcaatttgggccgggcgcggtggctcacgcctgtaatcccagcactttgggaggccgaggcgggcagatcacaaggtcaggagtctgagatcagcttggccaatatggtgaaaccccgtctctactaaaactacaaatatatatacatatctatatgtacatacatatatatacacacacatatatatacatatacacacacatatatatacatatatatacacatatatatacacacacatatatatatacatatacacacacatatatatacatatatatacacacatatatatacacatatatatatacacatatatatacacacacacacatatatatatatatattagccaggcgtggtggcacgcacctgtagtcccagctactcgggaggctgaggcagaagaatcacttgaacccaggaggcggaggatgcagtgagccgagatcgccccgctgcactgcagcctgagccacagaacgggactccgtctaaaaaaataaataaaaaacaaatatttccccactctgccacatcgagaggccggcatggttcacccgtgggaggggaggagcaggtgtgctaagcagtagctgtggttttaaaatgtttttcttttcaccatcatccttctttatccctcagtttcttccctctgcagccccggaagaaggaggtgggccgttctcgcattgctgtaaaggaatacctcagactgggtaatttataaaggaagaggattcattggctcacagttctgcaggctgtacaggaagcgtagcagcatctgcttcttggaaggcctcaggaagctcccgatcatggcagaaggcaaagagggagcagatgcatcacacggcgaaagcaggagcaacaggagcaggaggtgccacacactttttttttttttttttttttgagatggagtctcgctctgtcgcccagactggatgaagtggcgcgatcttggctcactgtaacctctgccgcctgggttcaagcgattctagtgcctcatcctcccgagtagctgggaggcctccacaatcaccgatcactgtgtccaagggagaaggtgctggaggagcgtgttctgctcctcaagactgtggctcagaagcaacacatgtctcttctactcccattggccagaattagtcacatggccccaacctaactgcagtggtggctgagagtgttgtcttcctgagtacccagaaagaggaaaatgcaaaaagatttggtgaaaatatagcattgtctttgccataacaaacatacttcctttgttgatttttttaaatcaaaggcaataattggagataaatgtgttatatctcctcttggagaatattttgttgtcatgttaaaagcctctgaaaagtcttgctgtaaatatggaacttttatttaatctggcatttcccagatttggtgattgaggccttttaaataatttaatagctttggaattaatatttggagatataaactttgggaaattgccctaaatgtgtcaactggtgagtccaaatctgtggggggaaaatgatgagcaaagagatgagtaatgtgttctacaaaagtagaggacagtcaggtgcagtggctcaggcctgtaatctcagcactttgggaggctgaggtgggcagatcacctgttaggagttcaagaccagcctggccaacatggtgaaaccctgtttctactaaaaatataaaaattagccgggggttgtggcggacacctgtaatcccagcttctagggaggctgaggcaggggaatcacttgaacctgggaggtggaggttgcagtgagcagagatcacgccactgcactccagcctgggcaacagagcaagactctgtctcaaaaaaaaaaaaaaaaaaaaagtaaggaatgaattagacctggggctgagagagggagaggataacactggggaaaattttcctgagatgggaaaggcctgggaaacaatgacaggctcagagcagagggtgattcagcccaggccacaagcttgagggccctggagcagatgcagctataaaccaggagagtcggtgcagccaatgtcaagagctgggaggcttgtttggtgccgactcgtagccctgtgtagctagaggaatcttagggctcattcaaactgccttcttcatgttatagacaagaagggtaggggcttagaaaaatgtagttttttattcttaaagtaattcatattcatgaaagacaatctgaactaagcacaaagaagattaaaaaaaaaaacaaccaccatattctggtcaggtgcgatggttcatgcctgtaattccagcactttgggaggctgacacaggtagattgcttgagcccagaagtttgagaccagcctggtcaacagaatgagaccccatctctaaaaaagaatttataaattagctgggcatagtggcacttgcctgtagtcccagctactcagaaggctaaggtgggaggatcacctgaacccaggaggttgaggctgtagtaagctgtgatcccaccactgcactccagcctaggggggcaacagagcaagaccttgtctcaaaaaatatataaatataaataaaaacatattccaccttgtaaaggttaagtgttttattctggaggagacaactgccaccaggtggcactaaacctagctggcctgggctgatggggaaccccagctgtgcaggctctccaaggccactcattaacctcaaaataaggcagctccgcaaatcatatggttgtatttctggaccccacttactggttatgaaaatattttaccatttatttgatcggtctttctaattgtgctgtacaaatcttccacatcttaaatttttgggggtctatttgatcagtgagaaaaatggttaaaatatccattgttgacaatttttccttgtagttcagtttttgccttatatattttgaagctatgttgttaggtgtctaaggattcgtgccttatatgttctattcagttattttttttgataaaaatgaaatatctttttctgtcccattcaatccttttctttttgaattctgtctatagccagccatagcactctgaacatgcctgatcttgtctgaattctatagaatctgattggtattgctaaaccagcattttgttaatatttgtttgctacatctttttctatgtatttatttaaaaaaaaaaaaaattttgagacagggtctcactctgttgcccaggctggagtgcagtggcaccatcatggctcacagcagcctaggcctccccaggctcacgtaacctcaacctcaacctcccaagcagctgggactacaggtgcacaccaccacaccagctaatttttgtatttttttgtagagacaaggtctccctgtgttgcccaggctggtcttgaactcctgggctcaagcaaatccacccgccttggcctcccaaagtgctgggattacaggtgtgaaccatcgtgtccggcccatgctgtcttaattataatattatagcatttggaaggataatgccctaatattattctttttcagagctctcctagtcattggttactgttctttatgcaattctacaagaaacctattcagatttttattgaggtcacatatgacatctttacagtgttgaacagtgttgagcttttccgtctctctttctatggtttgtgtgtgtgtgtgtgtgtgtgtgtgtgttttcttttttcttttttttttttttgagacagggtctcactctgtcacccaggctggagtgcagtggcccgatcacggcttactgcagcctccacctcttggcttaagcaatcctcccacctcggcctccagagtagctgggactacaggcacacaccaccatgcccagctaatttttgtattttttttttttgtagagatgggagtctcaccatgttgcctaggctgatcttgaactcctgggctcaagcaatccacccaccttggcctcccaaagtgctgggattacaggtgtgagccactgcgcccaggtcctatgtctttattttcagctttcccgtgtgcattgattgggaattggtttcacttcatgtagtagaaacaaactaatgcagctccgtcagtaagatttttttctcacacaagaagtctgaaggctgtggtccagaagaggtgaacatcaaagacgcatcaaccaactgggcttcttctaccattctaccatttgctcctctgtatttttttcttttcttttttttttttttttttttttttgagacggggtcttgctctgttgtcaggctggagtgcagtggtgcgatctcagctcattgcaacctctgcctcctgggttcaagagattcccctgcctcagcctcctgagtagctgggactacaggcatgcaccaccacgcccggctaattttttgtattttagtagagatggggtttcaccacgttgtccaggatggccttgatctcctgacctcgtgatctgaccgccttggcctcccaaaatgctgggattacaggcatgagccaccgcgcccagcctttttttttttttaggcggagtctcgctctgttgcccaggctggagtgcagtggagcaatctcagctcactgcaacctccacctcctgggctcaagcaattctcctgcctcagcctcctgagtagctgggactacaggcacctgccaccatgcccagctaactttttgtatttttagtagagatggggtttcaccgtgttagccaggatggccttgatctcctgaccttgtgatctgcctgcctcggcctctgaaagtgctgggattacaggtatgagccacagtgcccagccaatgctcctctgtatttagggcataacttagacctcctggttgagagagagctactgtacctccatgtcggtgacagcattccagacaggaaaaggtaacaagggtaaaggacacagagacatgcagatggaacagtcctttttagcagaaaaatgagagcttgctatgaagctgcacccagcagaattccacttacatcttagtgcctggaactgggttccatggacaccaccagctgcaagagagtctggggagttcagccttttaaaatgagcacgttgcttccctaaaaaaaatagggtctccattagtaagaggggaggatgaatcttgggtgaataactggcactgtctgcttcaccacagtattttgcttttgctatttcttgtaaacagcatataaatgagttctttttaaaaacccaatatgaatttataaaccttcaataataaaatagtatgagaccagtgcgtgaatagacagggataattagaacagaatataaatttcaggaataggcctaaatacacatcatagtttaataatgtgataggggtgacatctcaaaataaatgggggaagtcatggactattcagtaaattatgtagaaaaaaataaggctagacctatacttcacaccatataccaggatagattctaaaaggtccaaaagccaaaatgtaaaaaaaaaaaaaaaaagaaagaaaagaaaagaaaccttagaaatctgtaagaaaacctggaataactgttttataacataatccatatttcaaagtgagtgtgatacaccgcaaatgaccacaaattctttgaagctcttttccatcaagagatggagtctatttctctactccttgaatctggcctgggcttgtgacttgtgtagatcaacaaagtcatcagaaatgccactgacaagttccagagcctaggcctccaaaggctctgagcctttggctgtgctctcttggaatgctgtggtctgtgaagaagcccaggcaagcccacggaaggatgagtgaccgcgtggagcagagacaagtcacgactcagatagatgagcaaggccatcctagaccatccacctcctgctgagctggccctgactgaaagagccacccaaccacctacagagttgtaggcaaacaaatgattgctatttcaagctgttttgtttgtttgtttgtttgtttgttttactacatattggagtaatttatcactttgcaacaaaagataactgtaacgtcacttctaaaaatttatcctgcagatagaattgcaacatgtgcaaaatgacagacattaggtccagaccattcattgccccattgtctgtaaaatctttttgtggggcagaaacggggatgacagggtctcactctgtcacccaggctggagtgcagtggcatgatcatggctcaccacagccttgacctcccaagctcaggtgatcctcccacctcagcctctagagtagttgggactataggcacctgccaccatgcttggctaattttttttattttttgtaaagacaaggttttgccatgttgccctgactggtctcaaactcctaggctcaagcgattcacctgcctcagcctcccaaagtactaggattacaggcatgaaccactggacctagtattgacccatcgtttgtaatatctaaagactgaaaacaacctaaacctctatcactaagggatgggtgagtaagttattatatattcatacaaagggatactagacgatgtgaaaaaatattagcacctatatgctgatatggaaggatcttcaagaatattgctaaagtatataataaaaagatatatatggccaggtgtggtggcacatgcctgtaatcccagcactttgggaggccaaggtgggaagatcatgaggtcaggggttcgagaccaacctgaccaacatggtgaaatcccgtctctactaaaactacaaaaaattagccgggcatggtggcatgtgcctgtaatccaagctacttaggaggctgaggcaggagaatcacttgaacccaggaggtggaggttgcagtgagctgagatcgagccactgcactccagcctgggcaacagaccgagactccgtctccaaaaaaaaaaaaaaaaaagtatatacaagaatgttcataatcaccttattcataatagctaaaactgataattcaaatgtccaccaacaggtaaagtatggcgtattcatacaatgaaatgctacacaacaaagaacaaataactaatatacccaacaacagggatgatctgaaacaatattgagtcaaagaagtcagacacaaagagaacatattgcatgcttccatttctatgaagagtaagaggagatggatctaatctatggtgatggaagccagaggggtggttaccccctggggaatggagaggtgtgtttggactgaaaggggcaaaagaggaccttctggggaggtggaaatgctccatgtctagatctgggaggtggttatactggtttttataatgtatgtaaaaatcaccaagttgcacatttaagatctatgcattttactatatgtaaattatatcttaatttttctttcatttttttttttggagacagagtctggctttgttgcccaggctggagtatagtggtgcaatctcaatttacctaggctcaagtgatcctcccgcctcagccttctgagtagctgggactacaggtgtgtgtaccatgcctggctaatttctgttttttttgtttttgtttttgtttttggtagaggtgggtttttttcatgttgtccagactggtcttgaactcctgggctcaagttatcctcccggcccagcctcctaatctttcatttttttttttaagagacagggtttcactatgttgcccaggctggccttgaacttctgggctcaagtgaacctcctacctcatcctctcaagtacctgggactacaggtgtgtgccactgtactcagctttatagcttaacttttaaaaagaaatattgctaaagagaagaaaaaaaagcaagattcagactagtgtgcatagtatgtgcataaaaaagtgggagaaagaatatgaagtcatgtttgcttaaacaacgactgtaaggataccctagaatccaaaggagacagtctacttcggtggtggatttaccagaaggggccagggaggggagagggaggcatttcaccttttatcgttttggacttcttttttttttttaattttattattattatactttaagttttagggtacatgtgcacaatgtacaggttagttacatatgtatacatgtgccatgttggtgtgctgcacccattaactcatcatttagcattagttatatctcctaatgctatcccttccccctccccccaccccacaacagtccccggtgtgtgtgatgctccccttcctgtgtccatgtgttctcattgttcaattcccacgtatgagtgagaacatgtggtgtttggttttttgtccttgcgattgagtctcgctctgttgcccaggctggagtgcagtggtgcgatctcggctcactgcaagctccgcctcctgggttcacaccattctcctgcctcagcctcccgagtagctgggactgcaggctcccgccaccacgcctggctaattttttgtatttttagtagagacgggtttcaccatgttggccaggatggtcttgatctcctgacctcatgatctgccagccttggcctcccaaagtgctgggattacaggcatgagccaccatacccgaccccgttttggacttttgaatcctaagcataagttactcattcaaacaattttagaggtttaaatttaaaaagagtccagcctgaggactgctgcacttcagtaagtgagtttatatgccattgacttctgtcatttgaaattttcccttatcctacttctgtacttttcttgtttaccaggtttttacctctttcacatagttagtgggttgaattttgttgttccattcctcacctggccccagtaatttgaaaggttctgcctgtcctgcagtcaccccccacttaactcgcctacttaagctcattgtttcaccatgtctagagttgaccattatctataacctcccaccaagcaggtcaagagcctttgcagacatctgccaaacattggcacccctctccctaaatatgtgggaattttagactcaaatttgggagggggaggtttcaaagagaaattaatggaaatatttaattttaaataattttactaggtgtggtggctcacgcctctaatctcagggcttcaggagacaaggtgggagcatcactcgagcccaggagttttagaccttttctctacaaacaataaaaataaaaaaaattagccaggggggttgcatatgtctgtaatcccaactacttgggaggctgaggcaggagcatcacttgagcccaggagtttgaggctgcagtgagctatgattgggccactgtactccagcctggatgacatagtgagatcatctctaaaataaacacacaaacttctatacttaccatcgtgggtcttagtatcccactaccttctcctgaattcctttttgttagtatgtatctgccagtaattcctttgttgtgggtttgtgggtggcaatctttttaaattcttttatactgtatgtgaaaatgtcggccagggacagtggcttacgtcgctaattccagcactttgggagtccaaggtgggaggatcacttgtgcccaggagtttgagaccagcctgggcaacgtaagtgagacccctgtctctacaaaaaaaattttttaaattagccgggcatggtggcactcacctatagtcccagctgctcgggaggctgaagcaggaggattgcttaagcccagggtcttggaaagagtccacttcctgaccttttccagttccatggccttttcttccatcaacatacatccctccaacccctgaccctgtcaccgtcttctcccccactgtcacatcacctctcatggccctgtctcagtccccagccccatcgttaggggacatcaggcccagtacggacatgggactggagcgccaggcctctcctggtcactgttggtcagtgacaggctcccccggcccgccctcacccaatcactttctctttaacacggaagcaggcctcccagtcatcctctgcgtcttgggtcagcattccagcttctgcttatcctctagaaacttcactgggccatagtcctggtggtgattactctttccagctctgtgtcacctggaagcaaactccaggagcacctctgcgacttcaaccagtaggggagcagggctgggaagagaaagggcagtttcaagaggcacagggatgagaagaaagggaagaacacaacagtcgccacctacaggactgaccggccaaaccttgctcagaggccaagtctactcagttactgtctggccagtcctacccctcaacccccactgtgggggctaaaggtactccagcttggaagctgatcccacacgctgacctcgattaaccctagttctgggaatgcttctaagatttctaatttcacgtacttacccttaggtcaaaaaaggttgatgtaattgcaaatgtacacttaccctaaatcctggtccttaggcaaatcctgagtctggaaggtagcagtgcagggatccaccctctcatcttatggctgcctgagacatggcttctatctctatgtccctattaaatgtttctgagaaaactgggtttgtcaccctcttttttcagcctctcagctccctcagccttcaagggtaggttttccagggctgccatgttctaatcagccctgaccctcggcccacagcaactggcctggagataggtgggctcatgatttgatttttggccttggcacagggtctggtcagtctcttgctaaagtgaaagatgttaaatgttttcaatagcgaaggaaacactggtctgtggagagaggaataaggtcatcaggggacttccccaaggcacaggacactccagcacgggtgcctggcccaccatggaaaggcagacaggggaggtgactgtcacgaggatctgggagtgacgcgtggaagtgactactggaacagatactgaggtagtatgaataaggacactcactgacagaatacagatgtgtgcacactgatccggctatattttatgaaatggatcaaacatctggaaaagaacatttttgcagtccagtatggacttggcacgcaaagctgcagaccctgcctctgtgccccatctttgacaactgtccccaggccccagaagtacatccaggtcgtgcctgccctcctcccaggcctggaccatttcaagactcagtcccagccctggtgagaatccaagagctgtctctgctgccacatgaagtgagacaaggcagccaactgaggcaggagagtagggtcgggaggcagggaacctaaggctgtttcacgccgacttcctagaactaaatcgaaaggaaaaccctaactttccacgcctaagtaacaaaaggaccagaggctactccctttgatcttttctgtccacaaccaatcagactgattgcagactgagtcttcatttgcatagaagtataactttgtaacttcatcctagcctctgattggttgcttttggcaaccaatcagatgtttcgcacaggggtgtgacctttgtaacttcacttaagcctctggttggctgctgtctgcaaccaactgattgcaggctaccacttcatttacctgaggtgagcatgagtggccaatgggaatcttctaaggggatatttggacccaagaagattctgtatctgggcccttgagctgctgcctgggtccgctcccacactgtggagcctacttttgttttcaataaatccctttcgttcttttgttgcttcattctttctgtgcttttctgggcgttttgtctaattatttgttcaaaacgccaagaacctgggcaacttgcagtcacaaccctctaccggtgacacaacaacacctcaccgcccttcattcacccttggagttggctgtgtccaagactgcatctcagaggaggtgtgtgtccagaggcctcagggtcgctcctggtgccctgcgaggcgtgaggcgagtaggatgggatggtggcaggtggagcttgcggagggcaggagctagcctggatgcagcccccgctaagctgtcctggggcaggtgggcccttggggtcctcccttgtaagctgcccccggcctggcactgcaagagcaagtggagcctcacctgatttctccatagagagggtgcaggggaaggagcaggtgtgttgggaggattgcaaagtccaagcagacgtcagctgagctcattccacacgccgctgtcccactctttgggggcactcccagcccttgttggtctcaatggcatttctcccctcctgggtttcctggtctggtatcctacctactgtacacatgccccaaactctgctttgaagcccaattctcaccacgtggcatgactgtcccagctggccaccttcctggaattcagcccaaatcagtacttttgggaacttcctgcaaggtttcaaagaagcttttctgacacacagccaccatggagggtgttccagtccccggaccctgctgtggacatgaggacacccatcccccaccagccgagccagctgcaaaggcctcataatccagccccggccacccagaaggacagtgagcacagcctatctgagaatggtatttgaatctttaagaaaatgagactgactccaaaatctaaaactacctttattgtggttggctcgacataagatgccgccatcagcagaattataaaactgtacaggaggcacaaaaataggctgtttaacttagataatgaccctcatgtcttcaagctttaaaaatgcacataaaagttgtacaatctggcagtttataaaatataaagctaaaaagaggattttgggttccacaaagaagactgtatcacacaattaacacgtactaattaaacaattaaccatccacacagaagacataatggcacagaattcttaaaaatcacctaaaaattaacattttaccccgaccaaattaatcaccctttaataataagactactgtaaagcatccatcccatggaaggatacagtatcacttttccagttttaaaatggtcaagggtgttgtccaaaacaaatctgatgtgctttaagcaagtacaattgtaactggatacatttcagagtaaaaattaaataaatataaataggttaaataaataggtcattgcaaaaagaacactacacaaggtttacatctgagaatgcagagtaggtgactggtaatgctttctaggtaagtggggactccccatcacagctttagggacactgaaaaggaatactgtatccaccaaacacacacacagtacacaggggaggtgggggggctttggccaaagtgttggttaaggctgctccagtgggaggctcactgcagtcacgttctttgtggctttccaacgtctacagaaagaatttaagcgccggtacaaaaaatcagaaccagagttactcacgggaaatcactgtttcataaagaaggaggggagtagaccattgggtttaaaagatgatgtccaacctgggagggtggaatttcggctcacctggagaggatgcctgatgacttcctgccaggagaagccaaagccaggacatagtcaaccaaaataactccaggttggtgagggaagggacaaggaaaagaaacactgggaaattcaaagaaaggcaatctcagacactaaaagagcagagagagaaagcgacatgggggacttaaagaggctccttccagggcgctgggcttctcttccagcacagaaggctgcaaaagtggaactggcccccagttcccagaggatcacaaggccaaggatccaatgggcacaccatgaggacccaaggaaaggacagagaaaggaacggctctgggaaagccaaacctggccaaagtccaacttcctgaaaagaaagcagccaagaggagaaagccgtacaatccaaaggtccccccatctgcatgaacggtttgatcagcaaccaattaatctctcactgcagcaagaaaagaattgccaaagataactgaatcgcatgcacacaaaaccttaccaaaggctcagggtcaactctgataaggccctttcttctagagttggtgggaagaaactctgctggatctactcacctgcagatcttccagaacatctatctgtaactgatcagagtgatgtctccttggaagggcctctgaccaccactgcactgagaacacggcgggagtgagaacacctgcgcacccaggatttcacacttagccactagattgcttcacagctaatcagggaaatgccagtgttccccaggtgaaaatgttttggtgcctaatgacttgtggagcacttcaaaaactgagattaggccgggtgcggtggctcaagcctgtaatcccagcactttgggaggctgaggcaggcggatcacgaggttaggagatcgagaccatcctgcctaacatggggaaaccccgtctctactaaaaaaaatataaaaaattagccgagcgtggtggcacacacctgtaatcccagctactcgggaggctgaggcaggagaattgcttgaaccaaggaggcggaggttgcagtgagctgaggtcgtgccactgcactccagcctgggtgacagagcgagactctgtctcaaaaaaacaaaaaacaaacgaaaaaacactgaaattaaaaagactcaagaagcaacaagagaaattctggcacacgtgcccaagagaggtttagtaagacaagatttaaataagtcatagtgtcctttggattcctaacagatgtgaccaagctccatcttgaagatagcgtacagtacttctaaaaagctcaacagccttccaggattggagaagtcccataacctgaactacagaccaaacagctaagccgcaacacgatatgtgatggtgcagagctgttctggcctgaaaagaactttccacttgctgagcacagtgggaaaccagaattctcgagactagaactggatacaccagatgatgcccaaggtgttttcatgacaagtacccacacgagatctcttcaaacaaaccccccagaggatggacgggaaccagggctcctaaaggcgactaagaggaaagaccagaggtgaccggaccagatccctgtgattctgggacagaagagatgtaaaccgcaaacacgcgcccttccccacacactttggtttctttgtggcagcaacacttttttattgttctctctcatcacaagttttaggaaagcagaagttttgcctgtcttgttcatcgctgtatctccggcaccctatatcctgcctagctcaatacactaagtgctcaaataaaatacattgaataaatgattttgagaaatctgcgtggttagaaactagtatgataagcagaaaaggcatcggaaacagttgtctctaggcaagtggggctaaaacagggagatgacacaaaattgggtcactagaaatcacctgggtactcccaaagagaaaacctgtgctgagaacgagctgggctgggggcactccctgtggcaggcctgttaaatcactcgtggcaccttctccaccttctgatcctctcttgggttactgccaaagcccacaggtaaagcaccttgcagccgtatggggagctctgtctcaggccacctggcatgcggcatgggagcagcaggaaatgcggtctggccacgtttctgaacaacgcacagccttgcttagaagacgccaaggacaccgaccaagggccaaggttccaaggcctaagtgaggtaatcgatgagatttaaggatgtaggatcacgttaatagtagggaaaaaagtcactttagctatgatgaaaggaagggaactgaattctacaaaggcagaatgagagcttttgatgagtaaccatgatacaaatacacaaacagaaaacatcttacaacatgaagaaacagtgatttctctgtgagtaaaattcaacaatcccattcttaatactgaatggaatctctgagttcaccaggcctgagctgcaatgatcccccaactggctggagaaagtacatggacaacatctccttacacggtaggctgattgcattttaacctctaaggctctcgggagagaaaagacaaagttttgactgaaactaaagctaaaaattatgttaagtttagaaaaaaaaatatggtacaaacaatttagagactatttctttgatactgttcaatacatttacatagtgttgctataatgttttactcttcagcattagagaatgttctatacatgaacactcttgaggggatggtgatttttggtaccacaaaaaatagaagatgtattctatcttgcatttattcttcacaagaaagcttcaagtttagcttacttatgctgacatagcattctacagtataatcaaaatatagttattaaaatttgccaagaaaaacaaaaaagctggcccatgaagcacacggtgaccctggccttggccacccaccctggccctgactcaccacgagcctcttgttccaccggccttggggacgaaggagtttgactgcctactcgctggcccagggctttctcctggtgaccaggagggtcccattcggcggcctccctctggtcctgaaggctggcccctgtctgggtcttcgctgctctccttgaaggccagggaactctttacctcttgccccaggcgctcctgagcaccaccccgagatggcccgggacacacccaccaaaggccactgttctggccactggcactgggccacggctgcctccagaacagagcagcctcttcatttctgagacctgcagacacaaccccacctgccagcatgcatagctgaccagtccctaatgccacacctcatgctcatggctcctgctgcctctgcagaaacactagttaacagtgacctgggctactctgggcacatctgtgatcaatgagaaatctcacactgcaggacgacaccctctgaactccgtcctccccctcctcagcatcccccacctctcaattccggtctccagtgaaggctgtacttggtgcatctcagcctagctgtcccagcacgcaagcaaaatgtacgattccctcctctcccttcctgaaaggcctgtagactgacattaagcaggaatttaaaaagtctgaagcaagtttatccagtagatggctgggggtgctactcgcgctgtctctgaggccctcctttgcagacatcatgaccgtaaggcttttggggccagcatcttcccagttccctgtaggtcacgaggggccacttctcccacttcctggggtcagcactgtcctctgtgggctgcagagcaggcagctcaaggcacttggtttgggaagcctggtctccctgcaaagccgggaggcatcaagctctaattgtggtgaccaggccctcagtcacagctggggccaccagaacagaggggccgccctcgctcagagggcgtctggagtcactgggggctggggctctgggggctcgtggaagtagtagggctggaagagtctctcgtggctgcacagctccatggcccggtaggtgtgtgcgaggaggtgggggaagcgagatgtgaagtagcacacgaagtcgtcggggagggaccccagcgtctcccgcacctctgcaggcagctcccggtagtggtgcttctgcaaagag
